United States Patent Application Publication US 2026/0285995 A1, published September 24, 2026 (application 19/535,530).

The application's sequence listing, which the Patent Office published only in electronic form, follows.

SEQUENCE LISTING (1005 sequences)

SEQ ID NO: 1 - DNA, 1491 bp, synthetic construct
  misc_feature 1..1491: note = Synthetic
  source 1..1491: mol_type = other DNA
atggccctgcctgtcaccgcgttgcttcttcccctggcgctgctgctccacgccgctcgccccgaggtgcagctgctagaaagcgggggggggctggtgcagccaggcgggagcctccgtctctcctgcgctgcttccggctttaccttttcgatttacgccatgagttgggtgcgccaggccccgggtaagggcctggagtgggtctcggctatcagcgattctggcggtcgcacgtacttcgcggacagcgtgcgtggccggttcaccatctcccgcgacaattctaagaacacgttgtccctgcagatgaactccctgagagccgaggacactgccgtgtactactgtgccaaggtggattatagcaactacctctttttcgactattggggccagggcaccctggtgaccgtgtcgagcggaggtggaggttccggcgggggaggctccggaggcggcggatctgagatcgtgctgacccagtctccgggcaccctgtctctgtctcctggagagcgcgccaccctgagttgccgagcttctcagagcatcagctctagctacctggcctggtaccagcagaagccgggacaggcccctcgcctgctcatctacggcgcttcctcgagagccactggcatccctgaccgcttctctggatcgggctccggaacagatttcactctgactatttctcggttggagcccgaagacttcgctgtctactattgtcaacagtatggatcctccccgtacacctttggtcagggcaccaagctggagatcaaagggtccactacgacgcccgccccgaggccccctacccccgcaccaaccattgcgtcccagccgttgagcctgcggcctgaagcttgccgaccggcagcgggtggcgccgtccacactcgcggtttggatttcgcttgtgacaaagaccccaagttctgggtacttgttgtggtggggggcgtattagcatgctactcccttctggttaccgtcgcgttcatcatcttctgggtcaggtcgaagcgcagccgcctgctccatagcgactacatgaatatgaccccccgtcggcctggccccacacgcaagcactaccagccctacgcccccccaagagacttcgcggcctaccgctcacgcgtgaagttttcacgctctgcggacgctcccgcttatcagcagggccagaaccagctttacaacgagcttaacctgggccgccgagaggagtacgatgtgctggacaagcgcaggggccgtgacccggagatgggcgggaagcctcagcgccgcaaaaacccacaggagggcctgtacaacgagctgcagaaggacaaaatggccgaggcctactccgagataggtatgaagggcgagcgccggcgtggtaaaggccacgatggcctctatcagggtctgtccaccgccaccaaggacacctacgacgcactgcatatgcaagcgttaccaccccgctaa

SEQ ID NO: 2 - protein, 496 aa, synthetic construct
  REGION 1..496: note = Synthetic
MALPVTALLLPLALLLHAARPEVQLLESGGGLVQPGGSLRLSCAASGFTFSIYAMSWVRQAPGKGLEWVSAISDSGGRTYFADSVRGRFTISRDNSKNTLSLQMNSLRAEDTAVYYCAKVDYSNYLFFDYWGQGTLVTVSSGGGGSGGGGSGGGGSEIVLTQSPGTLSLSPGERATLSCRASQSISSSYLAWYQQKPGQAPRLLIYGASSRATGIPDRFSGSGSGTDFTLTISRLEPEDFAVYYCQQYGSSPYTFGQGTKLEIKGSTTTPAPRPPTPAPTIASQPLSLRPEACRPAAGGAVHTRGLDFACDKDPKFWVLVVVGGVLACYSLLVTVAFIIFWVRSKRSRLLHSDYMNMTPRRPGPTRKHYQPYAPPRDFAAYRSRVKFSRSADAPAYQQGQNQLYNELNLGRREEYDVLDKRRGRDPEMGGKPQRRKNPQEGLYNELQKDKMAEAYSEIGMKGERRRGKGHDGLYQGLSTATKDTYDALHMQALPPR

SEQ ID NO: 3 - DNA, 1470 bp, synthetic construct
  misc_feature 1..1470: note = Synthetic
  source 1..1470: mol_type = other DNA
atggccctgcctgtgacagctctgctcctccctctggccctgctgctccatgccgccagacccgaggtgcagctcctggagagtggtggaggcctggtccagccagggggctccttgcgtctgtcttgcgccgctagcggcttcactttttctatctacgccatgagttgggtgcgccaggctcctggtaaaggcctcgagtgggtctctgccatcagcgattctggtggacgcacctacttcgcggacagcgtacgtggccgcttcaccatcagccgggacaactccaagaacacgcttagcctgcagatgaattccctccgcgcggaggacaccgcagtctattactgtgccaaggtggattacagcaactacctgttcttcgactattggggccagggaacattggtgaccgtttcctctggtggcgggggttccggcggcggcggctcggggggtggggggtccgagatcgtgctgacccagagtcctggcactctttcgctgtcgccgggggagcgcgccactctgtcatgccgagcttctcagtcgatctcgtcctcttacctggcctggtaccagcagaagcccggccaggcgccgaggctgttgatttacggcgcatcctcccgcgctaccggcatccccgacagattttcaggcagcggctccggaaccgacttcacactaaccatttctcgcctggaacccgaggactttgccgtgtactactgtcaacagtacggttccagcccctataccttcggccagggcaccaagctggagatcaagggctccaccaccacccctgcccctagacctcccaccccagccccaacaatcgccagccagcctctgtctctgcggcccgaagcctgtagacctgctgccggcggagccgtgcacaccagaggcctggacttcgcctgcgacatctacatctgggcccctctggccggcacctgtggcgtgctgctgctgagcctggtgatcaccctgtactgcaaacggggcagaaagaaactcctgtatatattcaaacaaccatttatgagaccagtacaaactactcaagaggaagatggctgtagctgccgatttccagaagaagaagaaggaggatgtgaactgagagtgaagttcagcagatccgccgacgcccctgcctaccagcagggacagaaccagctgtacaacgagctgaacctgggcagacgggaagagtacgacgtgctggacaagcggagaggccgggaccccgagatgggcggaaagcccagacggaagaacccccaggaaggcctgtataacgaactgcagaaagacaagatggccgaggcctacagcgagatcggcatgaagggcgagcggaggcgcggcaagggccacgatggcctgtaccagggcctgagcaccgccaccaaggacacctacgacgccctgcacatgcaggccctgccccccagataa

SEQ ID NO: 4 - protein, 489 aa, synthetic construct
  REGION 1..489: note = Synthetic
MALPVTALLLPLALLLHAARPEVQLLESGGGLVQPGGSLRLSCAASGFTFSIYAMSWVRQAPGKGLEWVSAISDSGGRTYFADSVRGRFTISRDNSKNTLSLQMNSLRAEDTAVYYCAKVDYSNYLFFDYWGQGTLVTVSSGGGGSGGGGSGGGGSEIVLTQSPGTLSLSPGERATLSCRASQSISSSYLAWYQQKPGQAPRLLIYGASSRATGIPDRFSGSGSGTDFTLTISRLEPEDFAVYYCQQYGSSPYTFGQGTKLEIKGSTTTPAPRPPTPAPTIASQPLSLRPEACRPAAGGAVHTRGLDFACDIYIWAPLAGTCGVLLLSLVITLYCKRGRKKLLYIFKQPFMRPVQTTQEEDGCSCRFPEEEEGGCELRVKFSRSADAPAYQQGQNQLYNELNLGRREEYDVLDKRRGRDPEMGGKPRRKNPQEGLYNELQKDKMAEAYSEIGMKGERRRGKGHDGLYQGLSTATKDTYDALHMQALPPR

SEQ ID NO: 5 - DNA, 1485 bp, synthetic construct
  misc_feature 1..1485: note = Synthetic
  source 1..1485: mol_type = other DNA
atggccctgcctgtcactgcgctgctgctgccgctcgctctgctgcttcacgccgcccgaccgcaggtgcagttggtgcagtctggcgccgaggtgaagaagccggggtcgtccgtgaaagtaagctgtaaggcatccggctactccttcagcgattattacatgaattgggtgcgccaggctcctggccaggggctggagtggatgggagagattaatccaaccacaggcggcgctacctataaccagaagtttaaggctcgggtcactattactgctgacgagagcacctccacggcctacatggaactgtcctcgctgcgctccgaggacaccgcggtgtactactgtgctcgttccctgttccccgccaactacgctggtttcgtctattggggccagggcaccctggtcaccgtgtcgagtggcggaggcggcagtggcggcggcggctcgggaggcggtggcagcgacattcagatgacccagagcccctcttcactgtccgcctccgttggggaccgcgtcaccatcacctgctctgcgtcctcctcagtgagctacatgtattggtaccagcaaaagcccggcaaggcccccaagttgttgatctacgacaccagcaagctggctagcggagtacctagccgcttctctggttccggaagcgggaccgactacacgttcaccatctcctctctccagccggaagacatcgccacatactactgccagcagtggtctagttatccgtggaccttcggtcagggtactaaggtggagatcaagggctccactacgacccccgcccctaggcccccaacccccgctcccacgatcgcctcgcagccactttctctccgcccagaggcctgccgacctgccgcgggcggtgcagtgcacacacggggactagactttgcttgtgataaggaccccaaattttgggtcttggtggtggtgggtggggtgctggcctgctacagcctgctggtgaccgtggcgttcatcatcttctgggtccgttccaagcgcagccgcctgctgcactctgactacatgaacatgactccgcggcgccccggccctacccgcaagcactaccagccgtacgcgcccccccgcgatttcgccgcctaccggtcgcgcgttaaattttctcggtctgcggacgcccccgcctaccaacaggggcagaaccagctgtacaacgagctcaacctgggcaggagggaggagtacgatgtgctggacaagcgcaggggccgcgatccagagatgggcggtaagcctcagagacgtaaaaaccctcaggagggcctttacaacgaactccagaaggacaaaatggcggaggcatattcggagatcggtatgaaaggggagcgccgccgcggaaagggccatgacggcctttaccaagggttatccactgccaccaaggatacctacgacgctctgcatatgcaggcgctgcccccgcgt

SEQ ID NO: 6 - protein, 495 aa, synthetic construct
  REGION 1..495: note = Synthetic
MALPVTALLLPLALLLHAARPQVQLVQSGAEVKKPGSSVKVSCKASGYSFSDYYMNWVRQAPGQGLEWMGEINPTTGGATYNQKFKARVTITADESTSTAYMELSSLRSEDTAVYYCARSLFPANYAGFVYWGQGTLVTVSSGGGGSGGGGSGGGGSDIQMTQSPSSLSASVGDRVTITCSASSSVSYMYWYQQKPGKAPKLLIYDTSKLASGVPSRFSGSGSGTDYTFTISSLQPEDIATYYCQQWSSYPWTFGQGTKVEIKGSTTTPAPRPPTPAPTIASQPLSLRPEACRPAAGGAVHTRGLDFACDKDPKFWVLVVVGGVLACYSLLVTVAFIIFWVRSKRSRLLHSDYMNMTPRRPGPTRKHYQPYAPPRDFAAYRSRVKFSRSADAPAYQQGQNQLYNELNLGRREEYDVLDKRRGRDPEMGGKPQRRKNPQEGLYNELQKDKMAEAYSEIGMKGERRRGKGHDGLYQGLSTATKDTYDALHMQALPPR

SEQ ID NO: 7 - DNA, 1467 bp, synthetic construct
  misc_feature 1..1467: note = Synthetic
  source 1..1467: mol_type = other DNA
atggccctgcctgtgacagctctgctcctccctctggccctgctgctccatgccgccagaccccaggtgcagctggtgcagagcggcgccgaggtgaagaagcccggctcctctgtgaaagtgtcatgcaaggcatctggctactccttttcagattattacatgaactgggtccgccaggcccctggtcagggactggagtggatgggcgagattaatccaaccaccggcggagcaacttacaaccagaaatttaaagctcgggtcaccatcactgcggacgagagcacaagcacagcctacatggagctgagcagcttgcgctcggaggacacggccgtgtactactgtgctcgtagcctgttccccgccaactacgcgggtttcgtctattggggccagggcactctcgtaaccgtgtcctccggagggggtggctccggaggcggggggagtggtggtggcggctccgacatccagatgacccagagcccatcttccctttcggcttccgtgggggacagggtgaccatcacctgctctgcttcgagttccgttagctacatgtattggtaccagcagaagcctggcaaggcgcccaagctactcatctacgacaccagcaagctggcgtccggtgtcccctctcgcttctcgggctccggctctgggactgactacacgttcaccatttcttccctgcagccggaagatatcgccacctactactgtcaacagtggtcttcctatccgtggaccttcggacagggcaccaaggtggagatcaagggctcgaccaccacccctgcccctagacctcccaccccagccccaacaatcgccagccagcctctgtctctgcggcccgaagcctgtagacctgctgccggcggagccgtgcacaccagaggcctggacttcgcctgcgacatctacatctgggcccctctggccggcacctgtggcgtgctgctgctgagcctggtgatcaccctgtactgcaaacggggcagaaagaaactcctgtatatattcaaacaaccatttatgagaccagtacaaactactcaagaggaagatggctgtagctgccgatttccagaagaagaagaaggaggatgtgaactgagagtgaagttcagcagatccgccgacgcccctgcctaccagcagggacagaaccagctgtacaacgagctgaacctgggcagacgggaagagtacgacgtgctggacaagcggagaggccgggaccccgagatgggcggaaagcccagacggaagaacccccaggaaggcctgtataacgaactgcagaaagacaagatggccgaggcctacagcgagatcggcatgaagggcgagcggaggcgcggcaagggccacgatggcctgtaccagggcctgagcaccgccaccaaggacacctacgacgccctgcacatgcaggccctgccccccagataa

SEQ ID NO: 8 - protein, 488 aa, synthetic construct
  REGION 1..488: note = Synthetic
MALPVTALLLPLALLLHAARPQVQLVQSGAEVKKPGSSVKVSCKASGYSFSDYYMNWVRQAPGQGLEWMGEINPTTGGATYNQKFKARVTITADESTSTAYMELSSLRSEDTAVYYCARSLFPANYAGFVYWGQGTLVTVSSGGGGSGGGGSGGGGSDIQMTQSPSSLSASVGDRVTITCSASSSVSYMYWYQQKPGKAPKLLIYDTSKLASGVPSRFSGSGSGTDYTFTISSLQPEDIATYYCQQWSSYPWTFGQGTKVEIKGSTTTPAPRPPTPAPTIASQPLSLRPEACRPAAGGAVHTRGLDFACDIYIWAPLAGTCGVLLLSLVITLYCKRGRKKLLYIFKQPFMRPVQTTQEEDGCSCRFPEEEEGGCELRVKFSRSADAPAYQQGQNQLYNELNLGRREEYDVLDKRRGRDPEMGGKPRRKNPQEGLYNELQKDKMAEAYSEIGMKGERRRGKGHDGLYQGLSTATKDTYDALHMQALPPR

SEQ ID NO: 9 - DNA, 1485 bp, synthetic construct
  misc_feature 1..1485: note = Synthetic
  source 1..1485: mol_type = other DNA
atggcgctgcccgtgactgccctactcctgccccttgctctgcttttgcacgccgcccgccctcaaattcagctggtggagtccggagggggcgtggtgcagccgggacgcagtctccgcctgtcctgtgctgcgagcggcttcaccttcggctactacgccatgcattgggtgcgccaggcccccggcaaaggcctggagtgggtcgccgtgatcagctacgatggctcgatcaagtactacgcggactccgtgaagggccgcttcaccatttctagggacaactctaagaacacgctctacctacagatgaattccctgcgcgcagaagacactgcggtgtactactgtgctcgcgagggcccttatagcaactacctggattattggggccaggggaccctggtgaccgtgagctctgggggggggggctccggtggaggcggttcgggtggcggaggctctgctatccagctgacccagagcccgtctagcctttctgcgtcggttggtgatagagtcaccatcacctgccgagcgtcgcagggcatctcatccgccctggcgtggtaccagcagaagccgggaaaggctcccaagttcctgatctacgacgcctcgtccctggagagcggtgtcccctcgcgcttctctggtagcggttccgggacggacttcacactgaccatttcgtctttgcagccagaggactttgccacttactattgccagcagttcaacagttatcccttcaccttcggccccggcactaaggtggacatcaagggatccaccacaactcccgcgccgcgtcccccgacccctgcccccaccatcgcctcccagcccctgagcctgcgccccgaagcatgtcggccagctgccggcggcgccgtgcacacacgcggattggatttcgcgtgcgacaaagaccctaaattttgggtcctggttgtagtgggcggtgtgctggcctgctactccctattggtcaccgtggcgttcatcatattctgggtcaggtccaagcgcagccgtctgctgcacagtgactacatgaacatgactccgcgccggcccgggccaacccgcaagcactaccagccatacgcacctcctcgtgactttgccgcttaccggtccagggtaaaattttcacgctccgctgacgctccggcctatcagcagggtcagaaccagctgtacaacgagctcaacctgggccgccgtgaggagtacgacgtgttggacaagcgacgcggcagagacccggagatgggcggcaagccacagcgccggaagaatcctcaggagggcctgtacaacgagctgcaaaaggataagatggctgaagcttactccgagatcggcatgaaaggggagcgccgccgtggtaagggccatgatggcctttatcagggcctcagcaccgccaccaaggacacctacgacgcattacacatgcaggctctgcctcctcgatga

SEQ ID NO: 10 - protein, 494 aa, synthetic construct
  REGION 1..494: note = Synthetic
MALPVTALLLPLALLLHAARPQIQLVESGGGVVQPGRSLRLSCAASGFTFGYYAMHWVRQAPGKGLEWVAVISYDGSIKYYADSVKGRFTISRDNSKNTLYLQMNSLRAEDTAVYYCAREGPYSNYLDYWGQGTLVTVSSGGGGSGGGGSGGGGSAIQLTQSPSSLSASVGDRVTITCRASQGISSALAWYQQKPGKAPKFLIYDASSLESGVPSRFSGSGSGTDFTLTISSLQPEDFATYYCQQFNSYPFTFGPGTKVDIKGSTTTPAPRPPTPAPTIASQPLSLRPEACRPAAGGAVHTRGLDFACDKDPKFWVLVVVGGVLACYSLLVTVAFIIFWVRSKRSRLLHSDYMNMTPRRPGPTRKHYQPYAPPRDFAAYRSRVKFSRSADAPAYQQGQNQLYNELNLGRREEYDVLDKRRGRDPEMGGKPQRRKNPQEGLYNELQKDKMAEAYSEIGMKGERRRGKGHDGLYQGLSTATKDTYDALHMQALPPR

SEQ ID NO: 11 - DNA, 1464 bp, synthetic construct
  misc_feature 1..1464: note = Synthetic
  source 1..1464: mol_type = other DNA
atggccctgcctgtgacagctctgctcctccctctggccctgctgctccatgccgccagaccccaaattcagctggtggagagtggcgggggcgtggtccagccgggacgcagcttgcgtctgtcatgcgccgcgtctggcttcactttcggctactacgccatgcactgggtgcgccaggcccccggcaagggtcttgagtgggtcgccgtaattagctacgacggctccatcaagtactacgcggactccgtcaaggggcgcttcaccatatcccgggacaactccaagaacacgctgtacttgcagatgaactccctgcgcgccgaagatactgccgtgtactactgtgctcgtgagggcccctattcgaattacctggactattggggccaggggaccctggttaccgtgtcgtccgggggtgggggctccggcggcggcggctctggcggaggcggtagcgcaatccagctgacccagagcccttcgagcctttctgcttccgtgggcgacagggtcaccatcacctgccgagcgtcgcagggtatctctagtgcgctggcttggtaccagcagaagcctggaaaggcccccaaatttctcatctacgatgcatcttctctagagagcggggtgccatcccgcttttcaggttctggttccggaactgatttcacactcaccatcagctccctgcagccagaggactttgctacctactattgtcagcagttcaacagctaccccttcaccttcggcccgggcaccaaggtggacatcaaaggctctaccaccacccctgcccctagacctcccaccccagccccaacaatcgccagccagcctctgtctctgcggcccgaagcctgtagacctgctgccggcggagccgtgcacaccagaggcctggacttcgcctgcgacatctacatctgggcccctctggccggcacctgtggcgtgctgctgctgagcctggtgatcaccctgtactgcaaacggggcagaaagaaactcctgtatatattcaaacaaccatttatgagaccagtacaaactactcaagaggaagatggctgtagctgccgatttccagaagaagaagaaggaggatgtgaactgagagtgaagttcagcagatccgccgacgcccctgcctaccagcagggacagaaccagctgtacaacgagctgaacctgggcagacgggaagagtacgacgtgctggacaagcggagaggccgggaccccgagatgggcggaaagcccagacggaagaacccccaggaaggcctgtataacgaactgcagaaagacaagatggccgaggcctacagcgagatcggcatgaagggcgagcggaggcgcggcaagggccacgatggcctgtaccagggcctgagcaccgccaccaaggacacctacgacgccctgcacatgcaggccctgccccccagataa

SEQ ID NO: 12 - protein, 487 aa, synthetic construct
  REGION 1..487: note = Synthetic
MALPVTALLLPLALLLHAARPQIQLVESGGGVVQPGRSLRLSCAASGFTFGYYAMHWVRQAPGKGLEWVAVISYDGSIKYYADSVKGRFTISRDNSKNTLYLQMNSLRAEDTAVYYCAREGPYSNYLDYWGQGTLVTVSSGGGGSGGGGSGGGGSAIQLTQSPSSLSASVGDRVTITCRASQGISSALAWYQQKPGKAPKFLIYDASSLESGVPSRFSGSGSGTDFTLTISSLQPEDFATYYCQQFNSYPFTFGPGTKVDIKGSTTTPAPRPPTPAPTIASQPLSLRPEACRPAAGGAVHTRGLDFACDIYIWAPLAGTCGVLLLSLVITLYCKRGRKKLLYIFKQPFMRPVQTTQEEDGCSCRFPEEEEGGCELRVKFSRSADAPAYQQGQNQLYNELNLGRREEYDVLDKRRGRDPEMGGKPRRKNPQEGLYNELQKDKMAEAYSEIGMKGERRRGKGHDGLYQGLSTATKDTYDALHMQALPPR

SEQ ID NO: 13 - DNA, 1482 bp, synthetic construct
  misc_feature 1..1482: note = Synthetic
  source 1..1482: mol_type = other DNA
atggcgttgcctgttaccgctctgctgctgcccctggccctgctcttacacgccgcacgtccccaggtgcaactcgtcgaaagcgggggaggggtggtccagccggggcggtccctacgcctgtcatgcgccgcttccggcttcaccttctccgaccatggaatgcactgggtccgccaggccccgggtaaaggactggagtgggtggccgtgatttggtacgatggcagcaacaagtactacgcggactcagtgaagggccgcttcaccatttcgcgtgacaactccaagaacacgctttacctgcagatgaacagcctaagagctgaggacacagccgtgtactactgtgcgcgggattctatcatggtgcggggggactattggggccagggtacactggtcaccgtgtccagtggtgggggcggttctggaggcggaggctccggtggcggcgggagcgacatccagatgacccagagcccatcttctctgtccgcttccgtgggtgatcgtgtgacgatcacctgccgagcgtcgcagggcatctctagctggctcgcctggtaccaacagaagccggagaaggcaccgaagtccctgatctacgctgcctccagcctgcagagcggggtaccctctcgcttctctggctctggatcgggcaccgactttaccctgactatttcctccttgcaacccgaagatttcgccacttattactgtcagcagtataacagctaccccctgactttcggtggcggcaccaaggtggagatcaagggctccacgaccacaccggctcctaggccacccaccccggcgccaaccatcgcatcccagcctttgagtctgcgtcccgaggcctgtcgtcccgcggctgggggcgccgtccacacccgtggtttggatttcgcctgcgacaaggacccgaaattttgggtgctcgttgtggtgggcggtgtgcttgcgtgctactcacttctggtgactgttgcgttcatcatcttctgggtccgctctaagcgcagccgcctgctgcacagcgattacatgaatatgactccgcgccgccctggccctacccgcaagcactaccagccctatgctcccccccgggactttgcagcctacaggtcacgcgtcaaattttctcgctcggcggacgcccctgcctaccagcagggacagaaccagctgtacaatgaactcaacctgggccgcagagaggagtacgatgtgcttgacaagcggcgcgggagggacccagagatgggcggaaagcctcagcgccgaaaaaaccctcaggagggcctgtacaacgagctgcagaaggacaaaatggccgaggcttactccgagataggtatgaagggcgagcgccgccgcggcaagggccatgacggcctgtatcagggtctctccaccgctactaaggacacctacgacgctttgcacatgcaggccctccccccacgctaa

SEQ ID NO: 14 - protein, 493 aa, synthetic construct
  REGION 1..493: note = Synthetic
MALPVTALLLPLALLLHAARPQVQLVESGGGVVQPGRSLRLSCAASGFTFSDHGMHWVRQAPGKGLEWVAVIWYDGSNKYYADSVKGRFTISRDNSKNTLYLQMNSLRAEDTAVYYCARDSIMVRGDYWGQGTLVTVSSGGGGSGGGGSGGGGSDIQMTQSPSSLSASVGDRVTITCRASQGISSWLAWYQQKPEKAPKSLIYAASSLQSGVPSRFSGSGSGTDFTLTISSLQPEDFATYYCQQYNSYPLTFGGGTKVEIKGSTTTPAPRPPTPAPTIASQPLSLRPEACRPAAGGAVHTRGLDFACDKDPKFWVLVVVGGVLACYSLLVTVAFIIFWVRSKRSRLLHSDYMNMTPRRPGPTRKHYQPYAPPRDFAAYRSRVKFSRSADAPAYQQGQNQLYNELNLGRREEYDVLDKRRGRDPEMGGKPQRRKNPQEGLYNELQKDKMAEAYSEIGMKGERRRGKGHDGLYQGLSTATKDTYDALHMQALPPR

SEQ ID NO: 15 - DNA, 1461 bp, synthetic construct
  misc_feature 1..1461: note = Synthetic
  source 1..1461: mol_type = other DNA
atggccctgcctgtgacagctctgctcctccctctggccctgctgctccatgccgccagaccccaggtgcagctggttgagagcggtggaggggtggtgcagccgggccgcagccttcgtctgtcgtgcgccgcatccggcttcaccttctctgatcatggaatgcactgggtgcgccaggcccccggtaaaggcctggagtgggtcgccgtgatctggtacgatggcagcaacaagtactacgcggactccgtgaagggtcgtttcactattagccgcgacaactccaaaaacacgctgtacctgcagatgaattccctccgcgccgaagacaccgcagtatattattgtgctcgggacagtatcatggtgcgcggcgactattggggccagggaaccctggtgaccgtctcttctggcggcggaggctccgggggcggcggctccggcggtgggggctccgacatccagatgacccagtccccatcgtcgcttagcgccagcgtgggggaccgcgtcaccatcacctgccgagcttctcagggcatctctagttggctcgcgtggtaccagcagaagcctgagaaggctccgaagtccttgatctacgcggcttccagcctgcagagcggtgtcccctctaggttttcaggctccggctcaggtacagatttcactctaactatttcttccctgcagcctgaggactttgccacctactactgtcaacagtacaactcttaccccctgaccttcggtggaggcaccaaggtggagatcaaggggtcgaccaccacccctgcccctagacctcccaccccagccccaacaatcgccagccagcctctgtctctgcggcccgaagcctgtagacctgctgccggcggagccgtgcacaccagaggcctggacttcgcctgcgacatctacatctgggcccctctggccggcacctgtggcgtgctgctgctgagcctggtgatcaccctgtactgcaaacggggcagaaagaaactcctgtatatattcaaacaaccatttatgagaccagtacaaactactcaagaggaagatggctgtagctgccgatttccagaagaagaagaaggaggatgtgaactgagagtgaagttcagcagatccgccgacgcccctgcctaccagcagggacagaaccagctgtacaacgagctgaacctgggcagacgggaagagtacgacgtgctggacaagcggagaggccgggaccccgagatgggcggaaagcccagacggaagaacccccaggaaggcctgtataacgaactgcagaaagacaagatggccgaggcctacagcgagatcggcatgaagggcgagcggaggcgcggcaagggccacgatggcctgtaccagggcctgagcaccgccaccaaggacacctacgacgccctgcacatgcaggccctgccccccagataa

SEQ ID NO: 16 - protein, 486 aa, synthetic construct
  REGION 1..486: note = Synthetic
MALPVTALLLPLALLLHAARPQVQLVESGGGVVQPGRSLRLSCAASGFTFSDHGMHWVRQAPGKGLEWVAVIWYDGSNKYYADSVKGRFTISRDNSKNTLYLQMNSLRAEDTAVYYCARDSIMVRGDYWGQGTLVTVSSGGGGSGGGGSGGGGSDIQMTQSPSSLSASVGDRVTITCRASQGISSWLAWYQQKPEKAPKSLIYAASSLQSGVPSRFSGSGSGTDFTLTISSLQPEDFATYYCQQYNSYPLTFGGGTKVEIKGSTTTPAPRPPTPAPTIASQPLSLRPEACRPAAGGAVHTRGLDFACDIYIWAPLAGTCGVLLLSLVITLYCKRGRKKLLYIFKQPFMRPVQTTQEEDGCSCRFPEEEEGGCELRVKFSRSADAPAYQQGQNQLYNELNLGRREEYDVLDKRRGRDPEMGGKPRRKNPQEGLYNELQKDKMAEAYSEIGMKGERRRGKGHDGLYQGLSTATKDTYDALHMQALPPR

SEQ ID NO: 17 - DNA, 1461 bp, synthetic construct
  misc_feature 1..1461: note = Synthetic
  source 1..1461: mol_type = other DNA
atggccctgcctgtgacagctctgctcctccctctggccctgctgctccatgccgccagacccgaggtgcagctggtgcagagcggcgccgaggttaagaagcccggtgctacagtcaagatctcatgcaaggtttctggctacacgttcaccgactactacatgaactgggtccagcaggctccgggcaaagggctggagtggatgggcattatcaatccatacaacggtggtacccactacaaccagaaatttaaaggccgtgtcaccatcactgcggacaccagcacggacaccgcctacatggagctgtcatctttgcggtctgaagataccgctgtatattactgtgccacctccggatatgacctgtatttcgactattggggccagggaactcttgtcaccgtgtcgtccggtgggggcggcagcggaggcggtgggagcggcggcggtggctccgagattgtgatgacccagagcccagcaaccctctccgtgtctcccggagagagggccactctatcctgcaaggcatcccagaacgtgggcactgcggtggcgtggtaccagcagaagcctgggcaggcccctcgcctcctgatctactctgcgttcaaccgctacaacggcatcccggctcgcttctcgggttcgggccccggcacagatttcaccctgaccatctccagtctgcagagcgaggactttgccgtgtactactgtcaacagtactccacctaccccctgaccttcggcggagggactaaggtggagatcaagggctcgaccaccacccctgcccctagacctcccaccccagccccaacaatcgccagccagcctctgtctctgcggcccgaagcctgtagacctgctgccggcggagccgtgcacaccagaggcctggacttcgcctgcgacatctacatctgggcccctctggccggcacctgtggcgtgctgctgctgagcctggtgatcaccctgtactgcaaacggggcagaaagaaactcctgtatatattcaaacaaccatttatgagaccagtacaaactactcaagaggaagatggctgtagctgccgatttccagaagaagaagaaggaggatgtgaactgagagtgaagttcagcagatccgccgacgcccctgcctaccagcagggacagaaccagctgtacaacgagctgaacctgggcagacgggaagagtacgacgtgctggacaagcggagaggccgggaccccgagatgggcggaaagcccagacggaagaacccccaggaaggcctgtataacgaactgcagaaagacaagatggccgaggcctacagcgagatcggcatgaagggcgagcggaggcgcggcaagggccacgatggcctgtaccagggcctgagcaccgccaccaaggacacctacgacgccctgcacatgcaggccctgccccccagataa

SEQ ID NO: 18 - protein, 486 aa, synthetic construct
  REGION 1..486: note = Synthetic
MALPVTALLLPLALLLHAARPEVQLVQSGAEVKKPGATVKISCKVSGYTFTDYYMNWVQQAPGKGLEWMGIINPYNGGTHYNQKFKGRVTITADTSTDTAYMELSSLRSEDTAVYYCATSGYDLYFDYWGQGTLVTVSSGGGGSGGGGSGGGGSEIVMTQSPATLSVSPGERATLSCKASQNVGTAVAWYQQKPGQAPRLLIYSAFNRYNGIPARFSGSGPGTDFTLTISSLQSEDFAVYYCQQYSTYPLTFGGGTKVEIKGSTTTPAPRPPTPAPTIASQPLSLRPEACRPAAGGAVHTRGLDFACDIYIWAPLAGTCGVLLLSLVITLYCKRGRKKLLYIFKQPFMRPVQTTQEEDGCSCRFPEEEEGGCELRVKFSRSADAPAYQQGQNQLYNELNLGRREEYDVLDKRRGRDPEMGGKPRRKNPQEGLYNELQKDKMAEAYSEIGMKGERRRGKGHDGLYQGLSTATKDTYDALHMQALPPR

SEQ ID NO: 19 - DNA, 1482 bp, synthetic construct
  misc_feature 1..1482: note = Synthetic
  source 1..1482: mol_type = other DNA
atggcgttgcccgtcaccgccctgctcctgcccctggctctgctgctgcacgccgctcgtcctcaggtgcagcttgtggagagcggaggcggcgttgtgcagcctggcagatcactgcgcctgtcatgcgccacttccggcttcaccttctcagactacggcatgcactgggtacgtcaggcccccggcaagggtctggagtgggtggcggtcatatggtatgatgggagcaacaagtactacgcggactccgttaaagggcgtttcaccatctctcgcgacaactcgaaaaagaccctgtccctgcaaatgaattccctgcgggccgaggacacggccgtgtactactgtgctcgcgattctatcatggtgcggggcgattattggggccaggggaccctggtgaccgtatcctcgggaggtggcggcagcggaggtggcgggagtggcggaggcggcagtgacatccagatgacccagtcgccttcctccctgtccgcctccgtgggggacagggtgaccatcacctgccgagcatcccagggcatttcgagttggctcgcctggtaccagcagaagccagagaaggccccaaaatccttgatctacgccgcatcttcccttcagagcggagtgccgtctcgcttcagcgggtctggctccggcaccgacttcactctgactattagctctttacagcctgaagactttgctacttattactgtcagcagtacaacagctaccccctgaccttcgggggcggtaccaaggtggagatcaagggttccaccacaaccccggctccacgcccccccacgcccgcgcctaccatcgccagccagccactctctctgcgccctgaggcttgccgaccggccgctgggggggcggtgcacacgcgcggtttggatttcgcgtgcgacaaggaccctaagttttgggtcctggtcgtggtgggcggcgtccttgcttgttactccctactcgtcaccgtggcgttcatcatcttctgggtccgtagcaagcgcagcaggctgctgcactccgattacatgaacatgactccgcgccgccccggtccgacccgcaagcactaccagccctatgcaccgcccagggactttgctgcctaccgatctcgggtcaagttttcgcgctccgccgacgcccccgcctaccaacagggacagaaccagctgtacaacgaacttaacctgggccgccgcgaggagtacgatgtgctggacaaacgtcgcggtcgggacccggagatgggcggcaagcctcagcgccgtaagaatccacaggagggcctctacaacgagctgcagaaggataaaatggccgaagcgtattccgagattggtatgaagggagagcgccgcagaggaaagggccatgacggcctgtaccagggtcttagtacagcaactaaggacacctacgacgcgctccatatgcaagccctaccgccccgctaa

SEQ ID NO: 20 - protein, 493 aa, synthetic construct
  REGION 1..493: note = Synthetic
MALPVTALLLPLALLLHAARPQVQLVESGGGVVQPGRSLRLSCATSGFTFSDYGMHWVRQAPGKGLEWVAVIWYDGSNKYYADSVKGRFTISRDNSKKTLSLQMNSLRAEDTAVYYCARDSIMVRGDYWGQGTLVTVSSGGGGSGGGGSGGGGSDIQMTQSPSSLSASVGDRVTITCRASQGISSWLAWYQQKPEKAPKSLIYAASSLQSGVPSRFSGSGSGTDFTLTISSLQPEDFATYYCQQYNSYPLTFGGGTKVEIKGSTTTPAPRPPTPAPTIASQPLSLRPEACRPAAGGAVHTRGLDFACDKDPKFWVLVVVGGVLACYSLLVTVAFIIFWVRSKRSRLLHSDYMNMTPRRPGPTRKHYQPYAPPRDFAAYRSRVKFSRSADAPAYQQGQNQLYNELNLGRREEYDVLDKRRGRDPEMGGKPQRRKNPQEGLYNELQKDKMAEAYSEIGMKGERRRGKGHDGLYQGLSTATKDTYDALHMQALPPR

SEQ ID NO: 21 - DNA, 1461 bp, synthetic construct
  misc_feature 1..1461: note = Synthetic
  source 1..1461: mol_type = other DNA
atggccctgcctgtgacagctctgctcctccctctggccctgctgctccatgccgccagaccccaggtccagctggtggagagtgggggaggggtggtgcagccagggcggtctttgcgcctgagctgcgccacttctggcttcacgttcagcgattatggtatgcactgggtgcgccaggccccgggcaaaggcctcgaatgggtcgctgtgatttggtacgacggcagcaacaagtactacgcggacagcgtgaagggccgcttcacaatttctcgcgacaactccaagaagactctttctctccagatgaattccctgcgcgccgaggacaccgccgtatactattgtgctcgtgattctatcatggtgcgtggtgattattggggccagggtactctggttacagtgtcctccggtggtggaggctcgggcggcggaggctccggtggcggcggctccgacatccagatgacccagagcccttcgtcgctgtccgcttccgtgggggacagggtcaccatcacctgccgagcgtctcagggcatctcgagttggctagcatggtaccagcagaagcccgagaaggcccccaaaagccttatctacgcggctagctcgttgcagagcggtgtcccttcccgcttttcaggctccggctccggcaccgacttcaccctgaccatctcctctctgcagccggaggactttgccacctactactgtcaacagtacaacagctaccccctgaccttcggcggagggaccaaggtggagatcaagggttccaccaccacccctgcccctagacctcccaccccagccccaacaatcgccagccagcctctgtctctgcggcccgaagcctgtagacctgctgccggcggagccgtgcacaccagaggcctggacttcgcctgcgacatctacatctgggcccctctggccggcacctgtggcgtgctgctgctgagcctggtgatcaccctgtactgcaaacggggcagaaagaaactcctgtatatattcaaacaaccatttatgagaccagtacaaactactcaagaggaagatggctgtagctgccgatttccagaagaagaagaaggaggatgtgaactgagagtgaagttcagcagatccgccgacgcccctgcctaccagcagggacagaaccagctgtacaacgagctgaacctgggcagacgggaagagtacgacgtgctggacaagcggagaggccgggaccccgagatgggcggaaagcccagacggaagaacccccaggaaggcctgtataacgaactgcagaaagacaagatggccgaggcctacagcgagatcggcatgaagggcgagcggaggcgcggcaagggccacgatggcctgtaccagggcctgagcaccgccaccaaggacacctacgacgccctgcacatgcaggccctgccccccagataa

SEQ ID NO: 22 - protein, 486 aa, synthetic construct
  REGION 1..486: note = Synthetic
MALPVTALLLPLALLLHAARPQVQLVESGGGVVQPGRSLRLSCATSGFTFSDYGMHWVRQAPGKGLEWVAVIWYDGSNKYYADSVKGRFTISRDNSKKTLSLQMNSLRAEDTAVYYCARDSIMVRGDYWGQGTLVTVSSGGGGSGGGGSGGGGSDIQMTQSPSSLSASVGDRVTITCRASQGISSWLAWYQQKPEKAPKSLIYAASSLQSGVPSRFSGSGSGTDFTLTISSLQPEDFATYYCQQYNSYPLTFGGGTKVEIKGSTTTPAPRPPTPAPTIASQPLSLRPEACRPAAGGAVHTRGLDFACDIYIWAPLAGTCGVLLLSLVITLYCKRGRKKLLYIFKQPFMRPVQTTQEEDGCSCRFPEEEEGGCELRVKFSRSADAPAYQQGQNQLYNELNLGRREEYDVLDKRRGRDPEMGGKPRRKNPQEGLYNELQKDKMAEAYSEIGMKGERRRGKGHDGLYQGLSTATKDTYDALHMQALPPR

SEQ ID NO: 23 - DNA, 729 bp, synthetic construct
  misc_feature 1..729: note = Synthetic
  source 1..729: mol_type = other DNA
gaggtgcagctgctagaaagcgggggggggctggtgcagccaggcgggagcctccgtctctcctgcgctgcttccggctttaccttttcgatttacgccatgagttgggtgcgccaggccccgggtaagggcctggagtgggtctcggctatcagcgattctggcggtcgcacgtacttcgcggacagcgtgcgtggccggttcaccatctcccgcgacaattctaagaacacgttgtccctgcagatgaactccctgagagccgaggacactgccgtgtactactgtgccaaggtggattatagcaactacctctttttcgactattggggccagggcaccctggtgaccgtgtcgagcggaggtggaggttccggcgggggaggctccggaggcggcggatctgagatcgtgctgacccagtctccgggcaccctgtctctgtctcctggagagcgcgccaccctgagttgccgagcttctcagagcatcagctctagctacctggcctggtaccagcagaagccgggacaggcccctcgcctgctcatctacggcgcttcctcgagagccactggcatccctgaccgcttctctggatcgggctccggaacagatttcactctgactatttctcggttggagcccgaagacttcgctgtctactattgtcaacagtatggatcctccccgtacacctttggtcagggcaccaagctggagatcaaa

SEQ ID NO: 24 - DNA, 729 bp, synthetic construct
  misc_feature 1..729: note = Synthetic
  source 1..729: mol_type = other DNA
gaggtgcagctcctggagagtggtggaggcctggtccagccagggggctccttgcgtctgtcttgcgccgctagcggcttcactttttctatctacgccatgagttgggtgcgccaggctcctggtaaaggcctcgagtgggtctctgccatcagcgattctggtggacgcacctacttcgcggacagcgtacgtggccgcttcaccatcagccgggacaactccaagaacacgcttagcctgcagatgaattccctccgcgcggaggacaccgcagtctattactgtgccaaggtggattacagcaactacctgttcttcgactattggggccagggaacattggtgaccgtttcctctggtggcgggggttccggcggcggcggctcggggggtggggggtccgagatcgtgctgacccagagtcctggcactctttcgctgtcgccgggggagcgcgccactctgtcatgccgagcttctcagtcgatctcgtcctcttacctggcctggtaccagcagaagcccggccaggcgccgaggctgttgatttacggcgcatcctcccgcgctaccggcatccccgacagattttcaggcagcggctccggaaccgacttcacactaaccatttctcgcctggaacccgaggactttgccgtgtactactgtcaacagtacggttccagcccctataccttcggccagggcaccaagctggagatcaag

SEQ ID NO: 25 - protein, 243 aa, synthetic construct
  REGION 1..243: note = Synthetic
EVQLLESGGGLVQPGGSLRLSCAASGFTFSIYAMSWVRQAPGKGLEWVSAISDSGGRTYFADSVRGRFTISRDNSKNTLSLQMNSLRAEDTAVYYCAKVDYSNYLFFDYWGQGTLVTVSSGGGGSGGGGSGGGGSEIVLTQSPGTLSLSPGERATLSCRASQSISSSYLAWYQQKPGQAPRLLIYGASSRATGIPDRFSGSGSGTDFTLTISRLEPEDFAVYYCQQYGSSPYTFGQGTKLEIK

SEQ ID NO: 26 - DNA, 726 bp, synthetic construct
  misc_feature 1..726: note = Synthetic
  source 1..726: mol_type = other DNA
caggtgcagctggtgcagagcggcgccgaggtgaagaagcccggctcctctgtgaaagtgtcatgcaaggcatctggctactccttttcagattattacatgaactgggtccgccaggcccctggtcagggactggagtggatgggcgagattaatccaaccaccggcggagcaacttacaaccagaaatttaaagctcgggtcaccatcactgcggacgagagcacaagcacagcctacatggagctgagcagcttgcgctcggaggacacggccgtgtactactgtgctcgtagcctgttccccgccaactacgcgggtttcgtctattggggccagggcactctcgtaaccgtgtcctccggagggggtggctccggaggcggggggagtggtggtggcggctccgacatccagatgacccagagcccatcttccctttcggcttccgtgggggacagggtgaccatcacctgctctgcttcgagttccgttagctacatgtattggtaccagcagaagcctggcaaggcgcccaagctactcatctacgacaccagcaagctggcgtccggtgtcccctctcgcttctcgggctccggctctgggactgactacacgttcaccatttcttccctgcagccggaagatatcgccacctactactgtcaacagtggtcttcctatccgtggaccttcggacagggcaccaaggtggagatcaag

SEQ ID NO: 27 - protein, 242 aa, synthetic construct
  REGION 1..242: note = Synthetic
QVQLVQSGAEVKKPGSSVKVSCKASGYSFSDYYMNWVRQAPGQGLEWMGEINPTTGGATYNQKFKARVTITADESTSTAYMELSSLRSEDTAVYYCARSLFPANYAGFVYWGQGTLVTVSSGGGGSGGGGSGGGGSDIQMTQSPSSLSASVGDRVTITCSASSSVSYMYWYQQKPGKAPKLLIYDTSKLASGVPSRFSGSGSGTDYTFTISSLQPEDIATYYCQQWSSYPWTFGQGTKVEIK

SEQ ID NO: 28 - DNA, 729 bp, synthetic construct
  misc_feature 1..729: note = Synthetic
  source 1..729: mol_type = other DNA
caaattcagctggtggagagtggcgggggcgtggtccagccgggacgcagcttgcgtctgtcatgcgccgcgtctggcttcactttcggctactacgccatgcactgggtgcgccaggcccccggcaagggtcttgagtgggtcgccgtaattagctacgacggctccatcaagtactacgcggactccgtcaaggggcgcttcaccatatcccgggacaactccaagaacacgctgtacttgcagatgaactccctgcgcgccgaagatactgccgtgtactactgtgctcgtgagggcccctattcgaattacctggactattggggccaggggaccctggttaccgtgtcgtccgggggtgggggctccggcggcggcggctctggcggaggcggtagcgcaatccagctgacccagagcccttcgagcctttctgcttccgtgggcgacagggtcaccatcacctgccgagcgtcgcagggtatctctagtgcgctggcttggtaccagcagaagcctggaaaggcccccaaatttctcatctacgatgcatcttctctagagagcggggtgccatcccgcttttcaggttctggttccggaactgatttcacactcaccatcagctccctgcagccagaggactttgctacctactattgtcagcagttcaacagctaccccttcaccttcggcccgggcaccaaggtggacatcaaaggctct

SEQ ID NO: 29 - protein, 243 aa, synthetic construct
  REGION 1..243: note = Synthetic
QIQLVESGGGVVQPGRSLRLSCAASGFTFGYYAMHWVRQAPGKGLEWVAVISYDGSIKYYADSVKGRFTISRDNSKNTLYLQMNSLRAEDTAVYYCAREGPYSNYLDYWGQGTLVTVSSGGGGSGGGGSGGGGSAIQLTQSPSSLSASVGDRVTITCRASQGISSALAWYQQKPGKAPKFLIYDASSLESGVPSRFSGSGSGTDFTLTISSLQPEDFATYYCQQFNSYPFTFGPGTKVDIKGS

SEQ ID NO: 30 - DNA, 720 bp, synthetic construct
  misc_feature 1..720: note = Synthetic
  source 1..720: mol_type = other DNA
caggtgcaactcgtcgaaagcgggggaggggtggtccagccggggcggtccctacgcctgtcatgcgccgcttccggcttcaccttctccgaccatggaatgcactgggtccgccaggccccgggtaaaggactggagtgggtggccgtgatttggtacgatggcagcaacaagtactacgcggactcagtgaagggccgcttcaccatttcgcgtgacaactccaagaacacgctttacctgcagatgaacagcctaagagctgaggacacagccgtgtactactgtgcgcgggattctatcatggtgcggggggactattggggccagggtacactggtcaccgtgtccagtggtgggggcggttctggaggcggaggctccggtggcggcgggagcgacatccagatgacccagagcccatcttctctgtccgcttccgtgggtgatcgtgtgacgatcacctgccgagcgtcgcagggcatctctagctggctcgcctggtaccaacagaagccggagaaggcaccgaagtccctgatctacgctgcctccagcctgcagagcggggtaccctctcgcttctctggctctggatcgggcaccgactttaccctgactatttcctccttgcaacccgaagatttcgccacttattactgtcagcagtataacagctaccccctgactttcggtggcggcaccaaggtggagatcaag

SEQ ID NO: 31 - DNA, 720 bp, synthetic construct
  misc_feature 1..720: note = Synthetic
  source 1..720: mol_type = other DNA
caggtgcagctggttgagagcggtggaggggtggtgcagccgggccgcagccttcgtctgtcgtgcgccgcatccggcttcaccttctctgatcatggaatgcactgggtgcgccaggcccccggtaaaggcctggagtgggtcgccgtgatctggtacgatggcagcaacaagtactacgcggactccgtgaagggtcgtttcactattagccgcgacaactccaaaaacacgctgtacctgcagatgaattccctccgcgccgaagacaccgcagtatattattgtgctcgggacagtatcatggtgcgcggcgactattggggccagggaaccctggtgaccgtctcttctggcggcggaggctccgggggcggcggctccggcggtgggggctccgacatccagatgacccagtccccatcgtcgcttagcgccagcgtgggggaccgcgtcaccatcacctgccgagcttctcagggcatctctagttggctcgcgtggtaccagcagaagcctgagaaggctccgaagtccttgatctacgcggcttccagcctgcagagcggtgtcccctctaggttttcaggctccggctcaggtacagatttcactctaactatttcttccctgcagcctgaggactttgccacctactactgtcaacagtacaactcttaccccctgaccttcggtggaggcaccaaggtggagatcaag

SEQ ID NO: 32 - protein, 240 aa, synthetic construct
  REGION 1..240: note = Synthetic
QVQLVESGGGVVQPGRSLRLSCAASGFTFSDHGMHWVRQAPGKGLEWVAVIWYDGSNKYYADSVKGRFTISRDNSKNTLYLQMNSLRAEDTAVYYCARDSIMVRGDYWGQGTLVTVSSGGGGSGGGGSGGGGSDIQMTQSPSSLSASVGDRVTITCRASQGISSWLAWYQQKPEKAPKSLIYAASSLQSGVPSRFSGSGSGTDFTLTISSLQPEDFATYYCQQYNSYPLTFGGGTKVEIK

SEQ ID NO: 33 - DNA, 720 bp, synthetic construct
  misc_feature 1..720: note = Synthetic
  source 1..720: mol_type = other DNA
gaggtgcagctggtgcagagcggcgccgaggttaagaagcccggtgctacagtcaagatctcatgcaaggtttctggctacacgttcaccgactactacatgaactgggtccagcaggctccgggcaaagggctggagtggatgggcattatcaatccatacaacggtggtacccactacaaccagaaatttaaaggccgtgtcaccatcactgcggacaccagcacggacaccgcctacatggagctgtcatctttgcggtctgaagataccgctgtatattactgtgccacctccggatatgacctgtatttcgactattggggccagggaactcttgtcaccgtgtcgtccggtgggggcggcagcggaggcggtgggagcggcggcggtggctccgagattgtgatgacccagagcccagcaaccctctccgtgtctcccggagagagggccactctatcctgcaaggcatcccagaacgtgggcactgcggtggcgtggtaccagcagaagcctgggcaggcccctcgcctcctgatctactctgcgttcaaccgctacaacggcatcccggctcgcttctcgggttcgggccccggcacagatttcaccctgaccatctccagtctgcagagcgaggactttgccgtgtactactgtcaacagtactccacctaccccctgaccttcggcggagggactaaggtggagatcaag

SEQ ID NO: 34 - protein, 240 aa, synthetic construct
  REGION 1..240: note = Synthetic
EVQLVQSGAEVKKPGATVKISCKVSGYTFTDYYMNWVQQAPGKGLEWMGIINPYNGGTHYNQKFKGRVTITADTSTDTAYMELSSLRSEDTAVYYCATSGYDLYFDYWGQGTLVTVSSGGGGSGGGGSGGGGSEIVMTQSPATLSVSPGERATLSCKASQNVGTAVAWYQQKPGQAPRLLIYSAFNRYNGIPARFSGSGPGTDFTLTISSLQSEDFAVYYCQQYSTYPLTFGGGTKVEIK

SEQ ID NO: 35 - DNA, 720 bp, synthetic construct
  misc_feature 1..720: note = Synthetic
  source 1..720: mol_type = other DNA
caggtgcagcttgtggagagcggaggcggcgttgtgcagcctggcagatcactgcgcctgtcatgcgccacttccggcttcaccttctcagactacggcatgcactgggtacgtcaggcccccggcaagggtctggagtgggtggcggtcatatggtatgatgggagcaacaagtactacgcggactccgttaaagggcgtttcaccatctctcgcgacaactcgaaaaagaccctgtccctgcaaatgaattccctgcgggccgaggacacggccgtgtactactgtgctcgcgattctatcatggtgcggggcgattattggggccaggggaccctggtgaccgtatcctcgggaggtggcggcagcggaggtggcgggagtggcggaggcggcagtgacatccagatgacccagtcgccttcctccctgtccgcctccgtgggggacagggtgaccatcacctgccgagcatcccagggcatttcgagttggctcgcctggtaccagcagaagccagagaaggccccaaaatccttgatctacgccgcatcttcccttcagagcggagtgccgtctcgcttcagcgggtctggctccggcaccgacttcactctgactattagctctttacagcctgaagactttgctacttattactgtcagcagtacaacagctaccccctgaccttcgggggcggtaccaaggtggagatcaag

SEQ ID NO: 36 - protein, 240 aa, synthetic construct
  REGION 1..240: note = Synthetic
QVQLVESGGGVVQPGRSLRLSCATSGFTFSDYGMHWVRQAPGKGLEWVAVIWYDGSNKYYADSVKGRFTISRDNSKKTLSLQMNSLRAEDTAVYYCARDSIMVRGDYWGQGTLVTVSSGGGGSGGGGSGGGGSDIQMTQSPSSLSASVGDRVTITCRASQGISSWLAWYQQKPEKAPKSLIYAASSLQSGVPSRFSGSGSGTDFTLTISSLQPEDFATYYCQQYNSYPLTFGGGTKVEIK

SEQ ID NO: 37 - protein, 107 aa, synthetic construct
  REGION 1..107: note = Synthetic
AIQLTQSPSSLSASVGDRVTITCRASQGISSALAWYQQKPGKAPKFLIYDASSLESGVPSRFSGSGSGTDFTLTISSLQPEDFATYYCQQFNSYPFTFGPGTKVDIK

SEQ ID NO: 38 - protein, 107 aa, synthetic construct
  REGION 1..107: note = Synthetic
DIQMTQSPSSLSASVGDRVTITCRASQGISSWLAWYQQKPEKAPKSLIYAASSLQSGVPSRFSGSGSGTDFTLTISSLQPEDFATYYCQQYNSYPLTFGGGTKVEIK

SEQ ID NO: 39 - protein, 108 aa, synthetic construct
  REGION 1..108: note = Synthetic
EIVLTQSPGTLSLSPGERATLSCRASQSISSSYLAWYQQKPGQAPRLLIYGASSRATGIPDRFSGSGSGTDFTLTISRLEPEDFAVYYCQQYGSSPYTFGQGTKLEIK

SEQ ID NO: 40 - protein, 107 aa, synthetic construct
  REGION 1..107: note = Synthetic
EIVMTQSPATLSVSPGERATLSCKASQNVGTAVAWYQQKPGQAPRLLIYSAFNRYNGIPARFSGSGPGTDFTLTISSLQSEDFAVYYCQQYSTYPLTFGGGTKVEIK

SEQ ID NO: 41 - protein, 106 aa, synthetic construct
  REGION 1..106: note = Synthetic
DIQMTQSPSSLSASVGDRVTITCSASSSVSYMYWYQQKPGKAPKLLIYDTSKLASGVPSRFSGSGSGTDYTFTISSLQPEDIATYYCQQWSSYPWTFGQGTKVEIK

SEQ ID NO: 42 - protein, 107 aa, synthetic construct; identical to SEQ ID NO: 38
  REGION 1..107: note = Synthetic

SEQ ID NO: 43 - protein, 119 aa, synthetic construct
  REGION 1..119: note = Synthetic
QIQLVESGGGVVQPGRSLRLSCAASGFTFGYYAMHWVRQAPGKGLEWVAVISYDGSIKYYADSVKGRFTISRDNSKNTLYLQMNSLRAEDTAVYYCAREGPYSNYLDYWGQGTLVTVSS

SEQ ID NO: 44 - protein, 118 aa, synthetic construct
  REGION 1..118: note = Synthetic
QVQLVESGGGVVQPGRSLRLSCAASGFTFSDHGMHWVRQAPGKGLEWVAVIWYDGSNKYYADSVKGRFTISRDNSKNTLYLQMNSLRAEDTAVYYCARDSIMVRGDYWGQGTLVTVSS

SEQ ID NO: 45 - protein, 120 aa, synthetic construct
  REGION 1..120: note = Synthetic
EVQLLESGGGLVQPGGSLRLSCAASGFTFSIYAMSWVRQAPGKGLEWVSAISDSGGRTYFADSVRGRFTISRDNSKNTLSLQMNSLRAEDTAVYYCAKVDYSNYLFFDYWGQGTLVTVSS

SEQ ID NO: 46 - protein, 118 aa, synthetic construct
  REGION 1..118: note = Synthetic
EVQLVQSGAEVKKPGATVKISCKVSGYTFTDYYMNWVQQAPGKGLEWMGIINPYNGGTHYNQKFKGRVTITADTSTDTAYMELSSLRSEDTAVYYCATSGYDLYFDYWGQGTLVTVSS

SEQ ID NO: 47 - protein, 121 aa, synthetic construct
  REGION 1..121: note = Synthetic
QVQLVQSGAEVKKPGSSVKVSCKASGYSFSDYYMNWVRQAPGQGLEWMGEINPTTGGATYNQKFKARVTITADESTSTAYMELSSLRSEDTAVYYCARSLFPANYAGFVYWGQGTLVTVSS

SEQ ID NO: 48 - protein, 118 aa, synthetic construct
  REGION 1..118: note = Synthetic
QVQLVESGGGVVQPGRSLRLSCATSGFTFSDYGMHWVRQAPGKGLEWVAVIWYDGSNKYYADSVKGRFTISRDNSKKTLSLQMNSLRAEDTAVYYCARDSIMVRGDYWGQGTLVTVSS

SEQ ID NO: 49 - protein, 11 aa, synthetic construct
  REGION 1..11: note = Synthetic
RASQGISSALA

SEQ ID NO: 50 - protein, 7 aa, synthetic construct
  REGION 1..7: note = Synthetic
DASSLES

SEQ ID NO: 51 - protein, 9 aa, synthetic construct
  REGION 1..9: note = Synthetic
QQFNSYPFT

SEQ ID NO: 52 - protein, 11 aa, synthetic construct
  REGION 1..11: note = Synthetic
RASQGISSWLA

SEQ ID NO: 53 - protein, 7 aa, synthetic construct
  REGION 1..7: note = Synthetic
AASSLQS

SEQ ID NO: 54 - protein, 9 aa, synthetic construct
  REGION 1..9: note = Synthetic
QQYNSYPLT

SEQ ID NO: 55 - protein, 12 aa, synthetic construct
  REGION 1..12: note = Synthetic
RASQSISSSYLA

SEQ ID NO: 56 - protein, 7 aa, synthetic construct
  REGION 1..7: note = Synthetic
GASSRAT

SEQ ID NO: 57 - protein, 9 aa, synthetic construct
  REGION 1..9: note = Synthetic
QQYGSSPYT

SEQ ID NO: 58 - protein, 10 aa, synthetic construct
  REGION 1..10: note = Synthetic
SASSSVSYMY

SEQ ID NO: 59 - protein, 7 aa, synthetic construct
  REGION 1..7: note = Synthetic
DTSKLAS

SEQ ID NO: 60 - protein, 9 aa, synthetic construct
  REGION 1..9: note = Synthetic
QQWSSYPWT

SEQ ID NO: 61 - protein, 10 aa, synthetic construct
  REGION 1..10: note = Synthetic
SASSSVSYMY

SEQ ID NO: 62 - protein, 7 aa, synthetic construct
  REGION 1..7: note = Synthetic
DTSKLAS

SEQ ID NO: 63 - protein, 9 aa, synthetic construct
  REGION 1..9: note = Synthetic
QQWSSYPWT

SEQ ID NO: 64 - protein, 11 aa, synthetic construct
  REGION 1..11: note = Synthetic
RASQGISSWLA

SEQ ID NO: 65 - protein, 7 aa, synthetic construct
  REGION 1..7: note = Synthetic
AASSLQS

SEQ ID NO: 66 - protein, 9 aa, synthetic construct
  REGION 1..9: note = Synthetic
QQYNSYPLT

SEQ ID NO: 67 - protein, 5 aa, synthetic construct
  REGION 1..5: note = Synthetic
YYAMH

SEQ ID NO: 68 - protein, 17 aa, synthetic construct
  REGION 1..17: note = Synthetic
VISYDGSIKYYADSVKG

SEQ ID NO: 69 - protein, 10 aa, synthetic construct
  REGION 1..10: note = Synthetic
EGPYSNYLDY

SEQ ID NO: 70 - protein, 5 aa, synthetic construct
  REGION 1..5: note = Synthetic
DHGMH

SEQ ID NO: 71 - protein, 17 aa, synthetic construct
  REGION 1..17: note = Synthetic
VIWYDGSNKYYADSVKG

SEQ ID NO: 72 - protein, 9 aa, synthetic construct
  REGION 1..9: note = Synthetic
DSIMVRGDY

SEQ ID NO: 73 - protein, 5 aa, synthetic construct
  REGION 1..5: note = Synthetic
IYAMS

SEQ ID NO: 74 - protein, 17 aa, synthetic construct
  REGION 1..17: note = Synthetic
AISDSGGRTYFADSVRG

SEQ ID NO: 75 - protein, 11 aa, synthetic construct
  REGION 1..11: note = Synthetic
VDYSNYLFFDY

SEQ ID NO: 76 - protein, 5 aa, synthetic construct
  REGION 1..5: note = Synthetic
DYYMN

SEQ ID NO: 77 - protein, 17 aa, synthetic construct
  REGION 1..17: note = Synthetic
EINPTTGGATYNQKFKA

SEQ ID NO: 78 - protein, 12 aa, synthetic construct
  REGION 1..12: note = Synthetic
SLFPANYAGFVY

SEQ ID NO: 79 - protein, 5 aa, synthetic construct
  REGION 1..5: note = Synthetic
DYYMN

SEQ ID NO: 80 - protein, 17 aa, synthetic construct
  REGION 1..17: note = Synthetic
EINPTTGGATYNQKFKA

SEQ ID NO: 81 - protein, 12 aa, synthetic construct
  REGION 1..12: note = Synthetic
SLFPANYAGFVY

SEQ ID NO: 82 - protein, 5 aa, synthetic construct
  REGION 1..5: note = Synthetic
DYGMH

SEQ ID NO: 83 - protein, 17 aa, synthetic construct
  REGION 1..17: note = Synthetic
VIWYDGSNKYYADSVKG

SEQ ID NO: 84 - protein, 9 aa, synthetic construct
  REGION 1..9: note = Synthetic
DSIMVRGDY

SEQ ID NO: 85 - DNA, 135 bp, synthetic construct
  misc_feature 1..135: note = Synthetic
  source 1..135: mol_type = other DNA
actacgacgcccgccccgaggccccctacccccgcaccaaccattgcgtcccagccgttgagcctgcggcctgaagcttgccgaccggcagcgggtggcgccgtccacactcgcggtttggatttcgcttgtgac

SEQ ID NO: 86 - DNA, 135 bp, synthetic construct
  misc_feature 1..135: note = Synthetic
  source 1..135: mol_type = other DNA
accaccacccctgcccctagacctcccaccccagccccaacaatcgccagccagcctctgtctctgcggcccgaagcctgtagacctgctgccggcggagccgtgcacaccagaggcctggacttcgcctgcgac

SEQ ID NO: 87 - DNA, 135 bp, synthetic construct
  misc_feature 1..135: note = Synthetic
  source 1..135: mol_type = other DNA
acgaccacaccggctcctaggccacccaccccggcgccaaccatcgcatcccagcctttgagtctgcgtcccgaggcctgtcgtcccgcggctgggggcgccgtccacacccgtggtttggatttcgcctgcgac

SEQ ID NO: 88 - DNA, 135 bp, synthetic construct
  misc_feature 1..135: note = Synthetic
  source 1..135: mol_type = other DNA
accacaaccccggctccacgcccccccacgcccgcgcctaccatcgccagccagccactctctctgcgccctgaggcttgccgaccggccgctgggggggcggtgcacacgcgcggtttggatttcgcgtgcgac

SEQ ID NO: 89 - protein, 45 aa, synthetic construct
  REGION 1..45: note = Synthetic
TTTPAPRPPTPAPTIASQPLSLRPEACRPAAGGAVHTRGLDFACD

SEQ ID NO: 90 - DNA, 81 bp, synthetic construct
  misc_feature 1..81: note = Synthetic
  source 1..81: mol_type = other DNA
ttctgggtacttgttgtggtggggggcgtattagcatgctactcccttctggttaccgtcgcgttcatcatcttctgggtc

SEQ ID NO: 91 - DNA, 81 bp, synthetic construct
  misc_feature 1..81: note = Synthetic
  source 1..81: mol_type = other DNA
ttttgggtcctggtcgtggtgggcggcgtccttgcttgttactccctactcgtcaccgtggcgttcatcatcttctgggtc

SEQ ID NO: 92 - DNA, 81 bp, synthetic construct
  misc_feature 1..81: note = Synthetic
  source 1..81: mol_type = other DNA
ttttgggtgctcgttgtggtgggcggtgtgcttgcgtgctactcacttctggtgactgttgcgttcatcatcttctgggtc

SEQ ID NO: 93 - protein, 27 aa, synthetic construct
  REGION 1..27: note = Synthetic
FWVLVVVGGVLACYSLLVTVAFIIFWV

SEQ ID NO: 94 - DNA, 72 bp, synthetic construct
  misc_feature 1..72: note = Synthetic
  source 1..72: mol_type = other DNA
atctacatctgggcccctctggccggcacctgtggcgtgctgctgctgagcctggtgatcaccctgtactgc

SEQ ID NO: 95 - protein, 24 aa, synthetic construct
  REGION 1..24: note = Synthetic
IYIWAPLAGTCGVLLLSLVITLYC

SEQ ID NO: 96 - DNA, 117 bp, synthetic construct
  misc_feature 1..117: note = Synthetic
  source 1..117: mol_type = other DNA
aggtcgaagcgcagccgcctgctccatagcgactacatgaatatgaccccccgtcggcctggccccacacgcaagcactaccagccctacgcccccccaagagacttcgcggcctac

SEQ ID NO: 97 - DNA, 117 bp, synthetic construct
  misc_feature 1..117: note = Synthetic
  source 1..117: mol_type = other DNA
cgtagcaagcgcagcaggctgctgcactccgattacatgaacatgactccgcgccgccccggtccgacccgcaagcactaccagccctatgcaccgcccagggactttgctgcctac

SEQ ID NO: 98 - DNA, 117 bp, synthetic construct
  misc_feature 1..117: note = Synthetic
  source 1..117: mol_type = other DNA
cgctctaagcgcagccgcctgctgcacagcgattacatgaatatgactccgcgccgccctggccctacccgcaagcactaccagccctatgctcccccccgggactttgcagcctac

SEQ ID NO: 99 - protein, 39 aa, synthetic construct
  REGION 1..39: note = Synthetic
RSKRSRLLHSDYMNMTPRRPGPTRKHYQPYAPPRDFAAY

SEQ ID NO: 100 - DNA, 126 bp, synthetic construct
  misc_feature 1..126: note = Synthetic
  source 1..126: mol_type = other DNA
aaacggggcagaaagaaactcctgtatatattcaaacaaccatttatgagaccagtacaaactactcaagaggaagatggctgtagctgccgatttccagaagaagaagaaggaggatgtgaactg

SEQ ID NO: 101 - protein, 42 aa, synthetic construct
  REGION 1..42: note = Synthetic
KRGRKKLLYIFKQPFMRPVQTTQEEDGCSCRFPEEEEGGCEL

SEQ ID NO: 102 - DNA, 339 bp, synthetic construct
  misc_feature 1..339: note = Synthetic
  source 1..339: mol_type = other DNA
cgcgtgaagttttcacgctctgcggacgctcccgcttatcagcagggccagaaccagctttacaacgagcttaacctgggccgccgagaggagtacgatgtgctggacaagcgcaggggccgtgacccggagatgggcgggaagcctcagcgccgcaaaaacccacaggagggcctgtacaacgagctgcagaaggacaaaatggccgaggcctactccgagataggtatgaagggcgagcgccggcgtggtaaaggccacgatggcctctatcagggtctgtccaccgccaccaaggacacctacgacgcactgcatatgcaagcgttaccaccccgc

SEQ ID NO: 103 - protein, 112 aa, synthetic construct
  REGION 1..112: note = Synthetic
RVKFSRSADAPAYQQGQNQLYNELNLGRREEYDVLDKRRGRDPEMGGKPRRKNPQEGLYNELQKDKMAEAYSEIGMKGERRRGKGHDGLYQGLSTATKDTYDALHMQALPPR

SEQ ID NO: 104 - DNA, 336 bp, synthetic construct
  misc_feature 1..336: note = Synthetic
  source 1..336: mol_type = other DNA
agagtgaagttcagcagatccgccgacgcccctgcctaccagcagggacagaaccagctgtacaacgagctgaacctgggcagacgggaagagtacgacgtgctggacaagcggagaggccgggaccccgagatgggcggaaagcccagacggaagaacccccaggaaggcctgtataacgaactgcagaaagacaagatggccgaggcctacagcgagatcggcatgaagggcgagcggaggcgcggcaagggccacgatggcctgtaccagggcctgagcaccgccaccaaggacacctacgacgccctgcacatgcaggccctgccccccaga

SEQ ID NO: 105 - DNA, 324 bp, synthetic construct
  misc_feature 1..324: note = Synthetic
  source 1..324: mol_type = other DNA
gagatcgtgctgacccagagtcctggcactctttcgctgtcgccgggggagcgcgccactctgtcatgccgagcttctcagtcgatctcgtcctcttacctggcctggtaccagcagaagcccggccaggcgccgaggctgttgatttacggcgcatcctcccgcgctaccggcatccccgacagattttcaggcagcggctccggaaccgacttcacactaaccatttctcgcctggaacccgaggactttgccgtgtactactgtcaacagtacggttccagcccctataccttcggccagggcaccaagctggagatcaag

SEQ ID NO: 106 - DNA, 4250 bp, synthetic construct
  misc_feature 1..4250: note = Synthetic
  source 1..4250: mol_type = other DNA
ttggccactccctctctgcgcgctcgctcgctcactgaggccgggcgaccaaaggtcgcccgacgcccgggctttgcccgggcggcctcagtgagcgagcgagcgcgcagagagggagtggccaactccatcactaggggttcctagatcttgccaacataccataaacctcccattctgctaatgcccagcctaagttggggagaccactccagattccaagatgtacagtttgctttgctgggcctttttcccatgcctgcctttactctgccagagttatattgctggggttttgaagaagatcctattaaataaaagaataagcagtattattaagtagccctgcatttcaggtttccttgagtggcaggccaggcctggccgtgaacgttcactgaaatcatggcctcttggccaagattgatagcttgtgcctgtccctgagtcccagtccatcacgagcagctggtttctaagatgctatttcccgtataaagcatgagaccgtgacttgccagccccacagagccccgcccttgtccatcactggcatctggactccagcctgggttggggcaaagagggaaatgagatcatgtcctaaccctgatcctcttgtcccacagatatccagaaccctgaccctgcggctccggtgcccgtcagtgggcagagcgcacatcgcccacagtccccgagaagttggggggaggggtcggcaattgaaccggtgcctagagaaggtggcgcggggtaaactgggaaagtgatgtcgtgtactggctccgcctttttcccgagggtgggggagaaccgtatataagtgcagtagtcgccgtgaacgttctttttcgcaacgggtttgccgccagaacacaggtaagtgccgtgtgtggttcccgcgggcctggcctctttacgggttatggcccttgcgtgccttgaattacttccacgcccctggctgcagtacgtgattcttgatcccgagcttcgggttggaagtgggtgggagagttcgaggccttgcgcttaaggagccccttcgcctcgtgcttgagttgaggcctggcttgggcgctggggccgccgcgtgcgaatctggtggcaccttcgcgcctgtctcgctgctttcgataagtctctagccatttaaaatttttgatgacctgctgcgacgctttttttctggcaagatagtcttgtaaatgcgggccaagatgtgcacactggtatttcggtttttggggccgcgggcggcgacggggcccgtgcgtcccagcgcacatgttcggcgaggcggggcctgcgagcgcggccaccgagaatcggacgggggtagtctcaagctggccggcctgctctggtgcctggcctcgcgccgccgtgtatcgccccgccctgggcggcaaggctggcccggtcggcaccagttgcgtgagcggaaagatggccgcttcccggccctgctgcagggagctcaaaatggaggacgcggcgctcgggagagcgggcgggtgagtcacccacacaaaggaaaagggcctttccgtcctcagccgtcgcttcatgtgactccacggagtaccgggcgccgtccaggcacctcgattagttctcgagcttttggagtacgtcgtctttaggttggggggaggggttttatgcgatggagtttccccacactgagtgggtggagactgaagttaggccagcttggcacttgatgtaattctccttggaatttgccctttttgagtttggatcttggttcattctcaagcctcagacagtggttcaaagtttttttcttccatttcaggtgtcgtgatgcggccgccaccatggccctgcctgtgacagctctgctcctccctctggccctgctgctccatgccgccagacccgaggtgcagctcctggagagtggtggaggcctggtccagccagggggctccttgcgtctgtcttgcgccgctagcggcttcactttttctatctacgccatgagttgggtgcgccaggctcctggtaaaggcctcgagtgggtctctgccatcagcgattctggtggacgcacctacttcgcggacagcgtacgtggccgcttcaccatcagccgggacaactccaagaacacgcttagcctgcagatgaattccctccgcgcggaggacaccgcagtctattactgtgccaaggtggattacagcaactacctgttcttcgactattggggccagggaacattggtgaccgtttcctctggtggcgggggttccggcggcggcggctcggggggtggggggtccgagatcgtgctgacccagagtcctggcactctttcgctgtcgccgggggagcgcgccactctgtcatgccgagcttctcagtcgatctcgtcctcttacctggcctggtaccagcagaagcccggccaggcgccgaggctgttgatttacggcgcatcctcccgcgctaccggcatccccgacagattttcaggcagcggctccggaaccgacttcacactaaccatttctcgcctggaacccgaggactttgccgtgtactactgtcaacagtacggttccagcccctataccttcggccagggcaccaagctggagatcaagggctccaccaccacccctgcccctagacctcccaccccagccccaacaatcgccagccagcctctgtctctgcggcccgaagcctgtagacctgctgccggcggagccgtgcacaccagaggcctggacttcgcctgcgacatctacatctgggcccctctggccggcacctgtggcgtgctgctgctgagcctggtgatcaccctgtactgcaaacggggcagaaagaaactcctgtatatattcaaacaaccatttatgagaccagtacaaactactcaagaggaagatggctgtagctgccgatttccagaagaagaagaaggaggatgtgaactgagagtgaagttcagcagatccgccgacgcccctgcctaccagcagggacagaaccagctgtacaacgagctgaacctgggcagacgggaagagtacgacgtgctggacaagcggagaggccgggaccccgagatgggcggaaagcccagacggaagaacccccaggaaggcctgtataacgaactgcagaaagacaagatggccgaggcctacagcgagatcggcatgaagggcgagcggaggcgcggcaagggccacgatggcctgtaccagggcctgagcaccgccaccaaggacacctacgacgccctgcacatgcaggccctgccccccagataacctcgactgtgccttctagttgccagccatctgttgtttgcccctcccccgtgccttccttgaccctggaaggtgccactcccactgtcctttcctaataaaatgaggaaattgcatcgcattgtctgagtaggtgtcattctattctggggggtggggtggggcaggacagcaagggggaggattgggaagacaatagcaggcatgctggggatgcggtgggctctatggcttctgaggcggaaagaaccagctggggctctagggggtatccccactagtcgtgtaccagctgagagactctaaatccagtgacaagtctgtctgcctattcaccgattttgattctcaaacaaatgtgtcacaaagtaaggattctgatgtgtatatcacagacaaaactgtgctagacatgaggtctatggacttcaagagcaacagtgctgtggcctggagcaacaaatctgactttgcatgtgcaaacgccttcaacaacagcattattccagaagacaccttcttccccagcccaggtaagggcagctttggtgccttcgcaggctgtttccttgcttcaggaatggccaggttctgcccagagctctggtcaatgatgtctaaaactcctctgattggtggtctcggccttatccattgccaccaaaaccctctttttactaagaaacagtgagccttgttctggcagtccagagaatgacacgggaaaaaagcagatgaagagaaggtggcaggagagggcacgtggcccagcctcagtctctagatctaggaacccctagtgatggagttggccactccctctctgcgcgctcgctcgctcactgaggccgcccgggcaaagcccgggcgtcgggcgacctttggtcgcccggcctcagtgagcgagcgagcgcgcagagagggagtggccaa

SEQ ID NO: 107 - DNA, 2948 bp, synthetic construct
  misc_feature 1..2948: note = Synthetic
  source 1..2948: mol_type = other DNA
ggctccggtgcccgtcagtgggcagagcgcacatcgcccacagtccccgagaagttggggggaggggtcggcaattgaaccggtgcctagagaaggtggcgcggggtaaactgggaaagtgatgtcgtgtactggctccgcctttttcccgagggtgggggagaaccgtatataagtgcagtagtcgccgtgaacgttctttttcgcaacgggtttgccgccagaacacaggtaagtgccgtgtgtggttcccgcgggcctggcctctttacgggttatggcccttgcgtgccttgaattacttccacgcccctggctgcagtacgtgattcttgatcccgagcttcgggttggaagtgggtgggagagttcgaggccttgcgcttaaggagccccttcgcctcgtgcttgagttgaggcctggcttgggcgctggggccgccgcgtgcgaatctggtggcaccttcgcgcctgtctcgctgctttcgataagtctctagccatttaaaatttttgatgacctgctgcgacgctttttttctggcaagatagtcttgtaaatgcgggccaagatgtgcacactggtatttcggtttttggggccgcgggcggcgacggggcccgtgcgtcccagcgcacatgttcggcgaggcggggcctgcgagcgcggccaccgagaatcggacgggggtagtctcaagctggccggcctgctctggtgcctggcctcgcgccgccgtgtatcgccccgccctgggcggcaaggctggcccggtcggcaccagttgcgtgagcggaaagatggccgcttcccggccctgctgcagggagctcaaaatggaggacgcggcgctcgggagagcgggcgggtgagtcacccacacaaaggaaaagggcctttccgtcctcagccgtcgcttcatgtgactccacggagtaccgggcgccgtccaggcacctcgattagttctcgagcttttggagtacgtcgtctttaggttggggggaggggttttatgcgatggagtttccccacactgagtgggtggagactgaagttaggccagcttggcacttgatgtaattctccttggaatttgccctttttgagtttggatcttggttcattctcaagcctcagacagtggttcaaagtttttttcttccatttcaggtgtcgtgatgcggccgccaccatggccctgcctgtgacagctctgctcctccctctggccctgctgctccatgccgccagacccgaggtgcagctcctggagagtggtggaggcctggtccagccagggggctccttgcgtctgtcttgcgccgctagcggcttcactttttctatctacgccatgagttgggtgcgccaggctcctggtaaaggcctcgagtgggtctctgccatcagcgattctggtggacgcacctacttcgcggacagcgtacgtggccgcttcaccatcagccgggacaactccaagaacacgcttagcctgcagatgaattccctccgcgcggaggacaccgcagtctattactgtgccaaggtggattacagcaactacctgttcttcgactattggggccagggaacattggtgaccgtttcctctggtggcgggggttccggcggcggcggctcggggggtggggggtccgagatcgtgctgacccagagtcctggcactctttcgctgtcgccgggggagcgcgccactctgtcatgccgagcttctcagtcgatctcgtcctcttacctggcctggtaccagcagaagcccggccaggcgccgaggctgttgatttacggcgcatcctcccgcgctaccggcatccccgacagattttcaggcagcggctccggaaccgacttcacactaaccatttctcgcctggaacccgaggactttgccgtgtactactgtcaacagtacggttccagcccctataccttcggccagggcaccaagctggagatcaagggctccaccaccacccctgcccctagacctcccaccccagccccaacaatcgccagccagcctctgtctctgcggcccgaagcctgtagacctgctgccggcggagccgtgcacaccagaggcctggacttcgcctgcgacatctacatctgggcccctctggccggcacctgtggcgtgctgctgctgagcctggtgatcaccctgtactgcaaacggggcagaaagaaactcctgtatatattcaaacaaccatttatgagaccagtacaaactactcaagaggaagatggctgtagctgccgatttccagaagaagaagaaggaggatgtgaactgagagtgaagttcagcagatccgccgacgcccctgcctaccagcagggacagaaccagctgtacaacgagctgaacctgggcagacgggaagagtacgacgtgctggacaagcggagaggccgggaccccgagatgggcggaaagcccagacggaagaacccccaggaaggcctgtataacgaactgcagaaagacaagatggccgaggcctacagcgagatcggcatgaagggcgagcggaggcgcggcaagggccacgatggcctgtaccagggcctgagcaccgccaccaaggacacctacgacgccctgcacatgcaggccctgccccccagataacctcgactgtgccttctagttgccagccatctgttgtttgcccctcccccgtgccttccttgaccctggaaggtgccactcccactgtcctttcctaataaaatgaggaaattgcatcgcattgtctgagtaggtgtcattctattctggggggtggggtggggcaggacagcaagggggaggattgggaagacaatagcaggcatgctggggatgcggtgggctctatggcttctgaggcggaaagaaccagctggggctctagggggtatccccactagt

SEQ ID NO: 108 - DNA, 145 bp, synthetic construct
  misc_feature 1..145: note = Synthetic
  source 1..145: mol_type = other DNA
ttggccactccctctctgcgcgctcgctcgctcactgaggccgggcgaccaaaggtcgcccgacgcccgggctttgcccgggcggcctcagtgagcgagcgagcgcgcagagagggagtggccaactccatcactaggggttcct

SEQ ID NO: 109 - DNA, 145 bp, synthetic construct
  misc_feature 1..145: note = Synthetic
  source 1..145: mol_type = other DNA
aggaacccctagtgatggagttggccactccctctctgcgcgctcgctcgctcactgaggccgcccgggcaaagcccgggcgtcgggcgacctttggtcgcccggcctcagtgagcgagcgagcgcgcagagagggagtggccaa

SEQ ID NO: 110 - DNA, 1183 bp, synthetic construct
  misc_feature 1..1183: note = Synthetic
  source 1..1183: mol_type = other DNA
ggctccggtgcccgtcagtgggcagagcgcacatcgcccacagtccccgagaagttggggggaggggtcggcaattgaaccggtgcctagagaaggtggcgcggggtaaactgggaaagtgatgtcgtgtactggctccgcctttttcccgagggtgggggagaaccgtatataagtgcagtagtcgccgtgaacgttctttttcgcaacgggtttgccgccagaacacaggtaagtgccgtgtgtggttcccgcgggcctggcctctttacgggttatggcccttgcgtgccttgaattacttccacgcccctggctgcagtacgtgattcttgatcccgagcttcgggttggaagtgggtgggagagttcgaggccttgcgcttaaggagccccttcgcctcgtgcttgagttgaggcctggcttgggcgctggggccgccgcgtgcgaatctggtggcaccttcgcgcctgtctcgctgctttcgataagtctctagccatttaaaatttttgatgacctgctgcgacgctttttttctggcaagatagtcttgtaaatgcgggccaagatgtgcacactggtatttcggtttttggggccgcgggcggcgacggggcccgtgcgtcccagcgcacatgttcggcgaggcggggcctgcgagcgcggccaccgagaatcggacgggggtagtctcaagctggccggcctgctctggtgcctggcctcgcgccgccgtgtatcgccccgccctgggcggcaaggctggcccggtcggcaccagttgcgtgagcggaaagatggccgcttcccggccctgctgcagggagctcaaaatggaggacgcggcgctcgggagagcgggcgggtgagtcacccacacaaaggaaaagggcctttccgtcctcagccgtcgcttcatgtgactccacggagtaccgggcgccgtccaggcacctcgattagttctcgagcttttggagtacgtcgtctttaggttggggggaggggttttatgcgatggagtttccccacactgagtgggtggagactgaagttaggccagcttggcacttgatgtaattctccttggaatttgccctttttgagtttggatcttggttcattctcaagcctcagacagtggttcaaagtttttttcttccatttcaggtgtcgtga

SEQ ID NO: 111-300 - skipped (190 entries)

SEQ ID NO: 301 - RNA, 24 nt, synthetic construct
  misc_feature 1..24: note = Synthetic
  source 1..24: mol_type = other RNA
cgagatgtcatttcccagagcacc

SEQ ID NO: 302 - RNA, 20 nt, synthetic construct
  misc_feature 1..20: note = Synthetic
  source 1..20: mol_type = other RNA
tcgctttgctgaggtctata

SEQ ID NO: 303 - RNA, 20 nt, synthetic construct
  misc_feature 1..20: note = Synthetic
  source 1..20: mol_type = other RNA
tctactgctaccgcgttaac

SEQ ID NO: 304 - RNA, 20 nt, synthetic construct
  misc_feature 1..20: note = Synthetic
  source 1..20: mol_type = other RNA
gaagccacaggaagtctgtg

SEQ ID NO: 305 - RNA, 20 nt, synthetic construct
  misc_feature 1..20: note = Synthetic
  source 1..20: mol_type = other RNA
tctgatggggaaacaaaaca

SEQ ID NO: 306 - RNA, 20 nt, synthetic construct
  misc_feature 1..20: note = Synthetic
  source 1..20: mol_type = other RNA
ttcagagcagtttgagacag

SEQ ID NO: 307 - RNA, 20 nt, synthetic construct
  misc_feature 1..20: note = Synthetic
  source 1..20: mol_type = other RNA
actccagttcctgacggctg

SEQ ID NO: 308 - RNA, 20 nt, synthetic construct
  misc_feature 1..20: note = Synthetic
  source 1..20: mol_type = other RNA
acctacaggagtacctgacg

SEQ ID NO: 309 - RNA, 20 nt, synthetic construct
  misc_feature 1..20: note = Synthetic
  source 1..20: mol_type = other RNA
ttcccagagcaccagagcca

SEQ ID NO: 310 - RNA, 24 nt, synthetic construct
  misc_feature 1..24: note = Synthetic
  source 1..24: mol_type = other RNA
ctcagctacgtcccactggaagaa

SEQ ID NO: 311 - RNA, 24 nt, synthetic construct
  misc_feature 1..24: note = Synthetic
  source 1..24: mol_type = other RNA
tacatggtacacatccaggtgacg

SEQ ID NO: 312 - RNA, 20 nt, synthetic construct
  misc_feature 1..20: note = Synthetic
  source 1..20: mol_type = other RNA
ggtgatcgccgcggcgatgc

SEQ ID NO: 313 - RNA, 20 nt, synthetic construct
  misc_feature 1..20: note = Synthetic
  source 1..20: mol_type = other RNA
gccgcggcgatgccggagga

SEQ ID NO: 314 - RNA, 20 nt, synthetic construct
  misc_feature 1..20: note = Synthetic
  source 1..20: mol_type = other RNA
gtgcatccagcgcttcgcac

SEQ ID NO: 315 - RNA, 20 nt, synthetic construct
  misc_feature 1..20: note = Synthetic
  source 1..20: mol_type = other RNA
gctgaggtcctgggggcaca

SEQ ID NO: 316 - RNA, 20 nt, synthetic construct
  misc_feature 1..20: note = Synthetic
  source 1..20: mol_type = other RNA
caggacctcagcaggacccc

SEQ ID NO: 317 - RNA, 20 nt, synthetic construct
  misc_feature 1..20: note = Synthetic
  source 1..20: mol_type = other RNA
agcaggaccccaggctatac

SEQ ID NO: 318 - RNA, 20 nt, synthetic construct
  misc_feature 1..20: note = Synthetic
  source 1..20: mol_type = other RNA
ccccctgccagtatagcctg

SEQ ID NO: 319 - RNA, 20 nt, synthetic construct
  misc_feature 1..20: note = Synthetic
  source 1..20: mol_type = other RNA
ctcccagcgcctgacgcccc

SEQ ID NO: 320 - skipped

SEQ ID NO: 321 - RNA, 101 nt, synthetic construct
  misc_feature 1..101: note = Synthetic
  source 1..101: mol_type = other RNA
cgagatgtcatttcccagagcaccgttgtagctccctgaaaccgttgctacaataaggccgtcgaaagatgtgccgcaacgctctgccttctggcatcgtt

SEQ ID NO: 322 - RNA, 100 nt, synthetic construct
  misc_feature 1..100: note = Synthetic
  source 1..100: mol_type = other RNA
tcgctttgctgaggtctatagttttagagctagaaatagcaagttaaaataaggctagtccgttatcaacttgaaaaagtggcaccgagtcggtgctttt

SEQ ID NO: 323 - RNA, 100 nt, synthetic construct
  misc_feature 1..100: note = Synthetic
  source 1..100: mol_type = other RNA
tctactgctaccgcgttaacgttttagagctagaaatagcaagttaaaataaggctagtccgttatcaacttgaaaaagtggcaccgagtcggtgctttt

SEQ ID NO: 324 - RNA, 91 nt, synthetic construct
  misc_feature 1..91: note = Synthetic
  source 1..91: mol_type = other RNA
gaagccacaggaagtctgtggttttagagctagaaatagcaagttaaaataaggctagtccgttatcacgaaagggcaccgagtcggtgct

SEQ ID NO: 325 - RNA, 91 nt, synthetic construct
  misc_feature 1..91: note = Synthetic
  source 1..91: mol_type = other RNA
tctgatggggaaacaaaacagttttagagctagaaatagcaagttaaaataaggctagtccgttatcacgaaagggcaccgagtcggtgct

SEQ ID NO: 326 - RNA, 91 nt, synthetic construct
  misc_feature 1..91: note = Synthetic
  source 1..91: mol_type = other RNA
ttcagagcagtttgagacaggttttagagctagaaatagcaagttaaaataaggctagtccgttatcacgaaagggcaccgagtcggtgct

SEQ ID NO: 327 - RNA, 91 nt, synthetic construct
  misc_feature 1..91: note = Synthetic
  source 1..91: mol_type = other RNA
actccagttcctgacggctggttttagagctagaaatagcaagttaaaataaggctagtccgttatcacgaaagggcaccgagtcggtgct

SEQ ID NO: 328 - RNA, 91 nt, synthetic construct
  misc_feature 1..91: note = Synthetic
  source 1..91: mol_type = other RNA
acctacaggagtacctgacggttttagagctagaaatagcaagttaaaataaggctagtccgttatcacgaaagggcaccgagtcggtgct

SEQ ID NO: 329 - RNA, 91 nt, synthetic construct
  misc_feature 1..91: note = Synthetic
  source 1..91: mol_type = other RNA
ttcccagagcaccagagccagttttagagctagaaatagcaagttaaaataaggctagtccgttatcacgaaagggcaccgagtcggtgct

SEQ ID NO: 330 - RNA, 101 nt, synthetic construct
  misc_feature 1..101: note = Synthetic
  source 1..101: mol_type = other RNA
ctcagctacgtcccactggaagaagttgtagctccctgaaaccgttgctacaataaggccgtcgaaagatgtgccgcaacgctctgccttctggcatcgtt

SEQ ID NO: 331 - RNA, 101 nt, synthetic construct
  misc_feature 1..101: note = Synthetic
  source 1..101: mol_type = other RNA
tacatggtacacatccaggtgacggttgtagctccctgaaaccgttgctacaataaggccgtcgaaagatgtgccgcaacgctctgccttctggcatcgtt

SEQ ID NO: 332 - RNA, 100 nt, synthetic construct
  misc_feature 1..100: note = Synthetic
  source 1..100: mol_type = other RNA
ggtgatcgccgcggcgatgcgttttagagctagaaatagcaagttaaaataaggctagtccgttatcaacttgaaaaagtggcaccgagtcggtgctttt

SEQ ID NO: 333 - RNA, 100 nt, synthetic construct
  misc_feature 1..100: note = Synthetic
  source 1..100: mol_type = other RNA
gccgcggcgatgccggaggagttttagagctagaaatagcaagttaaaataaggctagtccgttatcaacttgaaaaagtggcaccgagtcggtgctttt

SEQ ID NO: 334 - RNA, 91 nt, synthetic construct
  misc_feature 1..91: note = Synthetic
  source 1..91: mol_type = other RNA
gtgcatccagcgcttcgcacgttttagagctagaaatagcaagttaaaataaggctagtccgttatcacgaaagggcaccgagtcggtgct

SEQ ID NO: 335 - RNA, 91 nt, synthetic construct
  misc_feature 1..91: note = Synthetic
  source 1..91: mol_type = other RNA
gctgaggtcctgggggcacagttttagagctagaaatagcaagttaaaataaggctagtccgttatcacgaaagggcaccgagtcggtgct

SEQ ID NO: 336 - RNA, 91 nt, synthetic construct
  misc_feature 1..91: note = Synthetic
  source 1..91: mol_type = other RNA
caggacctcagcaggaccccgttttagagctagaaatagcaagttaaaataaggctagtccgttatcacgaaagggcaccgagtcggtgct

SEQ ID NO: 337 - RNA, 91 nt, synthetic construct
  misc_feature 1..91: note = Synthetic
  source 1..91: mol_type = other RNA
agcaggaccccaggctatacgttttagagctagaaatagcaagttaaaataaggctagtccgttatcacgaaagggcaccgagtcggtgct

SEQ ID NO: 338 - RNA, 91 nt, synthetic construct
  misc_feature 1..91: note = Synthetic
  source 1..91: mol_type = other RNA
ccccctgccagtatagcctggttttagagctagaaatagcaagttaaaataaggctagtccgttatcacgaaagggcaccgagtcggtgct

SEQ ID NO: 339 - RNA, 91 nt, synthetic construct
  misc_feature 1..91: note = Synthetic
  source 1..91: mol_type = other RNA
ctcccagcgcctgacgccccgttttagagctagaaatagcaagttaaaataaggctagtccgttatcacgaaagggcaccgagtcggtgct

SEQ ID NO: 340 - skipped

SEQ ID NO: 341 - RNA, 101 nt, synthetic construct; identical to SEQ ID NO: 321
  misc_feature 1..101: note = Synthetic
  modified_base 1: mod_base = OTHER; note = 2'-O-methyl nucleotide, phosphorothioate linkage
  modified_base 2: mod_base = OTHER; note = 2'-O-methyl nucleotide, phosphorothioate linkage
  modified_base 3: mod_base = OTHER; note = 2'-O-methyl nucleotide, phosphorothioate linkage
  modified_base 4: mod_base = OTHER; note = 2'-O-methyl nucleotide
  modified_base 5: mod_base = OTHER; note = 2'-O-methyl nucleotide
  modified_base 8: mod_base = OTHER; note = 2'-O-methyl nucleotide
  modified_base 9: mod_base = OTHER; note = 2'-O-methyl nucleotide
  modified_base 11: mod_base = OTHER; note = 2'-O-methyl nucleotide
  modified_base 13: mod_base = OTHER; note = 2'-O-methyl nucleotide
  modified_base 18: mod_base = OTHER; note = 2'-O-methyl nucleotide
  modified_base 22: mod_base = OTHER; note = 2'-O-methyl nucleotide
  modified_base 25: mod_base = OTHER; note = 2'-O-methyl nucleotide
  modified_base 29: mod_base = OTHER; note = 2'-O-methyl nucleotide
  modified_base 30: mod_base = OTHER; note = 2'-O-methyl nucleotide
  modified_base 31: mod_base = OTHER; note = 2'-O-methyl nucleotide
  modified_base 32: mod_base = OTHER; note = 2'-O-methyl nucleotide
  modified_base 37: mod_base = OTHER; note = 2'-O-methyl nucleotide
  modified_base 38: mod_base = OTHER; note = 2'-O-methyl nucleotide
  modified_base 39: mod_base = OTHER; note = 2'-O-methyl nucleotide
  modified_base 40: mod_base = OTHER; note = 2'-O-methyl nucleotide
  modified_base 41: mod_base = OTHER; note = 2'-O-methyl nucleotide
  modified_base 42: mod_base = OTHER; note = 2'-O-methyl nucleotide
  modified_base 43: mod_base = OTHER; note = 2'-O-methyl nucleotide
  modified_base 47: mod_base = OTHER; note = 2'-O-methyl nucleotide
  modified_base 48: mod_base = OTHER; note = 2'-O-methyl nucleotide
  modified_base 51: mod_base = OTHER; note = 2'-O-methyl nucleotide
  modified_base 54: mod_base = OTHER; note = phosphorothioate linkage
  modified_base 58: mod_base = OTHER; note = 2'-O-methyl nucleotide
  modified_base 59: mod_base = OTHER; note = 2'-O-methyl nucleotide
  modified_base 61: mod_base = OTHER; note = 2'-O-methyl nucleotide
  modified_base 62: mod_base = OTHER; note = 2'-O-methyl nucleotide
  modified_base 63: mod_base = OTHER; note = 2'-O-methyl nucleotide
  modified_base 64: mod_base = OTHER; note = 2'-O-methyl nucleotide
  modified_base 65: mod_base = OTHER; note = 2'-O-methyl nucleotide
  modified_base 66: mod_base = OTHER; note = 2'-O-methyl nucleotide
  modified_base 67: mod_base = OTHER; note = 2'-O-methyl nucleotide
  modified_base 68: mod_base = OTHER; note = 2'-O-methyl nucleotide
  modified_base 69: mod_base = OTHER; note = 2'-O-methyl nucleotide
  modified_base 70: mod_base = OTHER; note = 2'-O-methyl nucleotide
  modified_base 75: mod_base = OTHER; note = 2'-O-methyl nucleotide
  modified_base 77: mod_base = OTHER; note = 2'-O-methyl nucleotide
  modified_base 80: mod_base = OTHER; note = 2'-O-methyl nucleotide
  modified_base 86: mod_base = OTHER; note = 2'-O-methyl nucleotide
  modified_base 87: mod_base = OTHER; note = 2'-O-methyl nucleotide
  modified_base 89: mod_base = OTHER; note = 2'-O-methyl nucleotide
  modified_base 90: mod_base = OTHER; note = 2'-O-methyl nucleotide
  modified_base 91: mod_base = OTHER; note = 2'-O-methyl nucleotide
  modified_base 92: mod_base = OTHER; note = 2'-O-methyl nucleotide
  modified_base 99: mod_base = OTHER; note = phosphorothioate linkage
  modified_base 100: mod_base = OTHER; note = 2'-O-methyl nucleotide, phosphorothioate linkage
  modified_base 101: mod_base = OTHER; note = 2'-O-methyl nucleotide
  source 1..101: mol_type = other RNA

SEQ ID NO: 342 - RNA, 101 nt, synthetic construct; identical to SEQ ID NO: 321
  misc_feature 1..101: note = Synthetic
  modified_base 1: mod_base = OTHER; note = 2'-O-methyl nucleotide, phosphorothioate linkage
  modified_base 2: mod_base = OTHER; note = 2'-O-methyl nucleotide, phosphorothioate linkage
  modified_base 3: mod_base = OTHER; note = 2'-O-methyl nucleotide, phosphorothioate linkage
  modified_base 4: mod_base = OTHER; note = 2'-O-methyl nucleotide
  modified_base 5: mod_base = OTHER; note = 2'-O-methyl nucleotide
  modified_base 8: mod_base = OTHER; note = 2'-O-methyl nucleotide
  modified_base 9: mod_base = OTHER; note = 2'-O-methyl nucleotide
  modified_base 11: mod_base = OTHER; note = 2'-O-methyl nucleotide
  modified_base 13: mod_base = OTHER; note = 2'-O-methyl nucleotide
  modified_base 18: mod_base = OTHER; note = 2'-O-methyl nucleotide
  modified_base 22: mod_base = OTHER; note = 2'-O-methyl nucleotide
  modified_base 25: mod_base = OTHER; note = 2'-O-methyl nucleotide
  modified_base 29: mod_base = OTHER; note = 2'-O-methyl nucleotide
  modified_base 30: mod_base = OTHER; note = 2'-O-methyl nucleotide
  modified_base 31: mod_base = OTHER; note = 2'-O-methyl nucleotide
  modified_base 32: mod_base = OTHER; note = 2'-O-methyl nucleotide
  modified_base 37: mod_base = OTHER; note = 2'-O-methyl nucleotide
  modified_base 38: mod_base = OTHER; note = 2'-O-methyl nucleotide
  modified_base 39: mod_base = OTHER; note = 2'-O-methyl nucleotide
  modified_base 40: mod_base = OTHER; note = 2'-O-methyl nucleotide
  modified_base 41: mod_base = OTHER; note = 2'-O-methyl nucleotide
  modified_base 42: mod_base = OTHER; note = 2'-O-methyl nucleotide
  modified_base 43: mod_base = OTHER; note = 2'-O-methyl nucleotide
  modified_base 47: mod_base = OTHER; note = 2'-O-methyl nucleotide
  modified_base 48: mod_base = OTHER; note = 2'-O-methyl nucleotide
  modified_base 51: mod_base = OTHER; note = 2'-O-methyl nucleotide
  modified_base 58: mod_base = OTHER; note = 2'-O-methyl nucleotide
  modified_base 59: mod_base = OTHER; note = 2'-O-methyl nucleotide
  modified_base 61: mod_base = OTHER; note = 2'-O-methyl nucleotide
  modified_base 62: mod_base = OTHER; note = 2'-O-methyl nucleotide
  modified_base 63: mod_base = OTHER; note = 2'-O-methyl nucleotide
  modified_base 64: mod_base = OTHER; note = 2'-O-methyl nucleotide
  modified_base 65: mod_base = OTHER; note = 2'-O-methyl nucleotide
  modified_base 66: mod_base = OTHER; note = 2'-O-methyl nucleotide
  modified_base 67: mod_base = OTHER; note = 2'-O-methyl nucleotide
  modified_base 68: mod_base = OTHER; note = 2'-O-methyl nucleotide
  modified_base 69: mod_base = OTHER; note = 2'-O-methyl nucleotide
  modified_base 70: mod_base = OTHER; note = 2'-O-methyl nucleotide
  modified_base 75: mod_base = OTHER; note = 2'-O-methyl nucleotide
  modified_base 77: mod_base = OTHER; note = 2'-O-methyl nucleotide
  modified_base 80: mod_base = OTHER; note = 2'-O-methyl nucleotide
  modified_base 86: mod_base = OTHER; note = 2'-O-methyl nucleotide
  modified_base 87: mod_base = OTHER; note = 2'-O-methyl nucleotide
  modified_base 89: mod_base = OTHER; note = 2'-O-methyl nucleotide
  modified_base 90: mod_base = OTHER; note = 2'-O-methyl nucleotide
  modified_base 91: mod_base = OTHER; note = 2'-O-methyl nucleotide
  modified_base 92: mod_base = OTHER; note = 2'-O-methyl nucleotide
  modified_base 99: mod_base = OTHER; note = phosphorothioate linkage
  modified_base 100: mod_base = OTHER; note = 2'-O-methyl nucleotide, phosphorothioate linkage
  modified_base 101: mod_base = OTHER; note = 2'-O-methyl nucleotide
  source 1..101: mol_type = other RNA

SEQ ID NO: 343 - RNA, 100 nt, synthetic construct; identical to SEQ ID NO: 322
  misc_feature 1..100: note = Synthetic
  modified_base 1: mod_base = OTHER; note = 2'-O-methyl nucleotide, phosphorothioate linkage
  modified_base 2: mod_base = OTHER; note = 2'-O-methyl nucleotide, phosphorothioate linkage
  modified_base 3: mod_base = OTHER; note = 2'-O-methyl nucleotide, phosphorothioate linkage
  modified_base 29: mod_base = OTHER; note = 2'-O-methyl nucleotide
  modified_base 30: mod_base = OTHER; note = 2'-O-methyl nucleotide
  modified_base 31: mod_base = OTHER; note = 2'-O-methyl nucleotide
  modified_base 32: mod_base = OTHER; note = 2'-O-methyl nucleotide
  modified_base 33: mod_base = OTHER; note = 2'-O-methyl nucleotide
  modified_base 34: mod_base = OTHER; note = 2'-O-methyl nucleotide
  modified_base 35: mod_base = OTHER; note = 2'-O-methyl nucleotide
  modified_base 36: mod_base = OTHER; note = 2'-O-methyl nucleotide
  modified_base 37: mod_base = OTHER; note = 2'-O-methyl nucleotide
  modified_base 38: mod_base = OTHER; note = 2'-O-methyl nucleotide
  modified_base 39: mod_base = OTHER; note = 2'-O-methyl nucleotide
  modified_base 40: mod_base = OTHER; note = 2'-O-methyl nucleotide
  modified_base 69: mod_base = OTHER; note = 2'-O-methyl nucleotide
  modified_base 70: mod_base = OTHER; note = 2'-O-methyl nucleotide
  modified_base 71: mod_base = OTHER; note = 2'-O-methyl nucleotide
  modified_base 72: mod_base = OTHER; note = 2'-O-methyl nucleotide
  modified_base 73: mod_base = OTHER; note = 2'-O-methyl nucleotide
  modified_base 74: mod_base = OTHER; note = 2'-O-methyl nucleotide
  modified_base 75: mod_base = OTHER; note = 2'-O-methyl nucleotide
  modified_base 76: mod_base = OTHER; note = 2'-O-methyl nucleotide
  modified_base 77: mod_base = OTHER; note = 2'-O-methyl nucleotide
  modified_base 78: mod_base = OTHER; note = 2'-O-methyl nucleotide
  modified_base 79: mod_base = OTHER; note = 2'-O-methyl nucleotide
  modified_base 80: mod_base = OTHER; note = 2'-O-methyl nucleotide
  modified_base 81: mod_base = OTHER; note = 2'-O-methyl nucleotide
  modified_base 82: mod_base = OTHER; note = 2'-O-methyl nucleotide
  modified_base 83: mod_base = OTHER; note = 2'-O-methyl nucleotide
  modified_base 84: mod_base = OTHER; note = 2'-O-methyl nucleotide
  modified_base 85: mod_base = OTHER; note = 2'-O-methyl nucleotide
  modified_base 86: mod_base = OTHER; note = 2'-O-methyl nucleotide
  modified_base 87: mod_base = OTHER; note = 2'-O-methyl nucleotide
  modified_base 88: mod_base = OTHER; note = 2'-O-methyl nucleotide
  modified_base 89: mod_base = OTHER; note = 2'-O-methyl nucleotide
  modified_base 90: mod_base = OTHER; note = 2'-O-methyl nucleotide
  modified_base 91: mod_base = OTHER; note = 2'-O-methyl nucleotide
  modified_base 92: mod_base = OTHER; note = 2'-O-methyl nucleotide
  modified_base 93: mod_base = OTHER; note = 2'-O-methyl nucleotide
  modified_base 94: mod_base = OTHER; note = 2'-O-methyl nucleotide
  modified_base 95: mod_base = OTHER; note = 2'-O-methyl nucleotide
  modified_base 96: mod_base = OTHER; note = 2'-O-methyl nucleotide
  modified_base 97: mod_base = OTHER; note = 2'-O-methyl nucleotide, phosphorothioate linkage
  modified_base 98: mod_base = OTHER; note = 2'-O-methyl nucleotide, phosphorothioate linkage
  modified_base 99: mod_base = OTHER; note = 2'-O-methyl nucleotide, phosphorothioate linkage
  modified_base 100: mod_base = OTHER; note = 2'-O-methyl nucleotide
  source 1..100: mol_type = other RNA

SEQ ID NO: 344 - RNA, 91 nt, synthetic construct
  misc_feature 1..91: note = Synthetic
  modified_base 1: mod_base = OTHER; note = 2'-O-methyl nucleotide, phosphorothioate linkage
  modified_base 2: mod_base = OTHER; note = 2'-O-methyl nucleotide, phosphorothioate linkage
  modified_base 3: mod_base = OTHER; note = 2'-O-methyl nucleotide, phosphorothioate linkage
  modified_base 29: mod_base = OTHER; note = 2'-O-methyl nucleotide
  modified_base 30: mod_base = OTHER; note = 2'-O-methyl nucleotide
  modified_base 31: mod_base = OTHER; note = 2'-O-methyl nucleotide
  modified_base 32: mod_base = OTHER; note = 2'-O-methyl nucleotide
  modified_base 33: mod_base = OTHER; note = 2'-O-methyl nucleotide
  modified_base 34: mod_base = OTHER; note = 2'-O-methyl nucleotide
  modified_base 35: mod_base = OTHER; note = 2'-O-methyl nucleotide
  modified_base 36: mod_base = OTHER; note = 2'-O-methyl nucleotide
  modified_base 37: mod_base = OTHER; note = 2'-O-methyl nucleotide
  modified_base 38: mod_base = OTHER; note = 2'-O-methyl nucleotide
  modified_base 39: mod_base = OTHER; note = 2'-O-methyl nucleotide
  modified_base 40: mod_base = OTHER; note = 2'-O-methyl nucleotide
  modified_base 88: mod_base = OTHER; note = 2'-O-methyl nucleotide, phosphorothioate linkage
  modified_base 89: mod_base = OTHER; note = 2'-O-methyl nucleotide, phosphorothioate linkage
  modified_base 90: mod_base = OTHER; note = 2'-O-methyl nucleotide, phosphorothioate linkage
  modified_base 91: mod_base = OTHER; note = 2'-O-methyl nucleotide
  source 1..91: mol_type = other RNA
tgggaggacctgcgcaagctgttttagagctagaaatagcaagttaaaataaggctagtccgttatcacgaaagggcaccgagtcggtgct

SEQ ID NO: 345 - RNA, 100 nt, synthetic construct; identical to SEQ ID NO: 323
  misc_feature 1..100: note = Synthetic
  modified_base 1: mod_base = OTHER; note = 2'-O-methyl nucleotide, phosphorothioate linkage
  modified_base 2: mod_base = OTHER; note = 2'-O-methyl nucleotide, phosphorothioate linkage
  modified_base 3: mod_base = OTHER; note = 2'-O-methyl nucleotide, phosphorothioate linkage
  modified_base 29: mod_base = OTHER; note = 2'-O-methyl nucleotide
  modified_base 30: mod_base = OTHER; note = 2'-O-methyl nucleotide
  modified_base 31: mod_base = OTHER; note = 2'-O-methyl nucleotide
  modified_base 32: mod_base = OTHER; note = 2'-O-methyl nucleotide
  modified_base 33: mod_base = OTHER; note = 2'-O-methyl nucleotide
  modified_base 34: mod_base = OTHER; note = 2'-O-methyl nucleotide
  modified_base 35: mod_base = OTHER; note = 2'-O-methyl nucleotide
  modified_base 36: mod_base = OTHER; note = 2'-O-methyl nucleotide
  modified_base 37: mod_base = OTHER; note = 2'-O-methyl nucleotide
  modified_base 38: mod_base = OTHER; note = 2'-O-methyl nucleotide
  modified_base 39: mod_base = OTHER; note = 2'-O-methyl nucleotide
  modified_base 40: mod_base = OTHER; note = 2'-O-methyl nucleotide
  modified_base 69: mod_base = OTHER; note = 2'-O-methyl nucleotide
  modified_base 70: mod_base = OTHER; note = 2'-O-methyl nucleotide
  modified_base 71: mod_base = OTHER; note = 2'-O-methyl nucleotide
  modified_base 72: mod_base = OTHER; note = 2'-O-methyl nucleotide
  modified_base 73: mod_base = OTHER; note = 2'-O-methyl nucleotide
  modified_base 74: mod_base = OTHER; note = 2'-O-methyl nucleotide
  modified_base 75: mod_base = OTHER; note = 2'-O-methyl nucleotide
  modified_base 76: mod_base = OTHER; note = 2'-O-methyl nucleotide
  modified_base 77: mod_base = OTHER; note = 2'-O-methyl nucleotide
  modified_base 78: mod_base = OTHER; note = 2'-O-methyl nucleotide
  modified_base 79: mod_base = OTHER; note = 2'-O-methyl nucleotide
  modified_base 80: mod_base = OTHER; note = 2'-O-methyl nucleotide
  modified_base 81: mod_base = OTHER; note = 2'-O-methyl nucleotide
  modified_base 82: mod_base = OTHER; note = 2'-O-methyl nucleotide
  modified_base 83: mod_base = OTHER; note = 2'-O-methyl nucleotide
  modified_base 84: mod_base = OTHER; note = 2'-O-methyl nucleotide
  modified_base 85: mod_base = OTHER; note = 2'-O-methyl nucleotide
  modified_base 86: mod_base = OTHER; note = 2'-O-methyl nucleotide
  modified_base 87: mod_base = OTHER; note = 2'-O-methyl nucleotide
  modified_base 88: mod_base = OTHER; note = 2'-O-methyl nucleotide
  modified_base 89: mod_base = OTHER; note = 2'-O-methyl nucleotide
  modified_base 90: mod_base = OTHER; note = 2'-O-methyl nucleotide
  modified_base 91: mod_base = OTHER; note = 2'-O-methyl nucleotide
  modified_base 92: mod_base = OTHER; note = 2'-O-methyl nucleotide
  modified_base 93: mod_base = OTHER; note = 2'-O-methyl nucleotide
  modified_base 94: mod_base = OTHER; note = 2'-O-methyl nucleotide
  modified_base 95: mod_base = OTHER; note = 2'-O-methyl nucleotide
  modified_base 96: mod_base = OTHER; note = 2'-O-methyl nucleotide
  modified_base 97: mod_base = OTHER; note = 2'-O-methyl nucleotide, phosphorothioate linkage
  modified_base 98: mod_base = OTHER; note = 2'-O-methyl nucleotide, phosphorothioate linkage
  modified_base 99: mod_base = OTHER; note = 2'-O-methyl nucleotide, phosphorothioate linkage
  modified_base 100: mod_base = OTHER; note = 2'-O-methyl nucleotide
  source 1..100: mol_type = other RNA

SEQ ID NO: 346 - RNA, 91 nt, synthetic construct
  misc_feature 1..91: note = Synthetic
  modified_base 1: mod_base = OTHER; note = 2'-O-methyl nucleotide, phosphorothioate linkage
  modified_base 2: mod_base = OTHER; note = 2'-O-methyl nucleotide, phosphorothioate linkage
  modified_base 3: mod_base = OTHER; note = 2'-O-methyl nucleotide, phosphorothioate linkage
  modified_base 29: mod_base = OTHER; note = 2'-O-methyl nucleotide
  modified_base 30: mod_base = OTHER; note = 2'-O-methyl nucleotide
  modified_base 31: mod_base = OTHER; note = 2'-O-methyl nucleotide
  modified_base 32: mod_base = OTHER; note = 2'-O-methyl nucleotide
  modified_base 33: mod_base = OTHER; note = 2'-O-methyl nucleotide
  modified_base 34: mod_base = OTHER; note = 2'-O-methyl nucleotide
  modified_base 35: mod_base = OTHER; note = 2'-O-methyl nucleotide
  modified_base 36: mod_base = OTHER; note = 2'-O-methyl nucleotide
  modified_base 37: mod_base = OTHER; note = 2'-O-methyl nucleotide
  modified_base 38: mod_base = OTHER; note = 2'-O-methyl nucleotide
  modified_base 39: mod_base = OTHER; note = 2'-O-methyl nucleotide
  modified_base 40: mod_base = OTHER; note = 2'-O-methyl nucleotide
  modified_base 88: mod_base = OTHER; note = 2'-O-methyl nucleotide, phosphorothioate linkage
  modified_base 89: mod_base = OTHER; note = 2'-O-methyl nucleotide, phosphorothioate linkage
  modified_base 90: mod_base = OTHER; note = 2'-O-methyl nucleotide, phosphorothioate linkage
  modified_base 91: mod_base = OTHER; note = 2'-O-methyl nucleotide
  source 1..91: mol_type = other RNA
tctactgctaccgcgttaacgttttagagctagaaatagcaagttaaaataaggctagtccgttatcacgaaagggcaccgagtcggtgct

SEQ ID NO: 347 - RNA, 91 nt, synthetic construct; identical to SEQ ID NO: 324
  misc_feature 1..91: note = Synthetic
  modified_base 1: mod_base = OTHER; note = 2'-O-methyl nucleotide, phosphorothioate linkage
  modified_base 2: mod_base = OTHER; note = 2'-O-methyl nucleotide, phosphorothioate linkage
  modified_base 3: mod_base = OTHER; note = 2'-O-methyl nucleotide, phosphorothioate linkage
  modified_base 29: mod_base = OTHER; note = 2'-O-methyl nucleotide
  modified_base 30: mod_base = OTHER; note = 2'-O-methyl nucleotide
  modified_base 31: mod_base = OTHER; note = 2'-O-methyl nucleotide
  modified_base 32: mod_base = OTHER; note = 2'-O-methyl nucleotide
  modified_base 33: mod_base = OTHER; note = 2'-O-methyl nucleotide
  modified_base 34: mod_base = OTHER; note = 2'-O-methyl nucleotide
  modified_base 35: mod_base = OTHER; note = 2'-O-methyl nucleotide
  modified_base 36: mod_base = OTHER; note = 2'-O-methyl nucleotide
  modified_base 37: mod_base = OTHER; note = 2'-O-methyl nucleotide
  modified_base 38: mod_base = OTHER; note = 2'-O-methyl nucleotide
  modified_base 39: mod_base = OTHER; note = 2'-O-methyl nucleotide
  modified_base 40: mod_base = OTHER; note = 2'-O-methyl nucleotide
  modified_base 88: mod_base = OTHER; note = 2'-O-methyl nucleotide, phosphorothioate linkage
  modified_base 89: mod_base = OTHER; note = 2'-O-methyl nucleotide, phosphorothioate linkage
  modified_base 90: mod_base = OTHER; note = 2'-O-methyl nucleotide, phosphorothioate linkage
  modified_base 91: mod_base = OTHER; note = 2'-O-methyl nucleotide
  source 1..91: mol_type = other RNA

SEQ ID NO: 348 - RNA, 91 nt, synthetic construct; identical to SEQ ID NO: 325
  misc_feature 1..91: note = Synthetic
  modified_base 1: mod_base = OTHER; note = 2'-O-methyl nucleotide, phosphorothioate linkage
  modified_base 2: mod_base = OTHER; note = 2'-O-methyl nucleotide, phosphorothioate linkage
  modified_base 3: mod_base = OTHER; note = 2'-O-methyl nucleotide, phosphorothioate linkage
  modified_base 29: mod_base = OTHER; note = 2'-O-methyl nucleotide
  modified_base 30: mod_base = OTHER; note = 2'-O-methyl nucleotide
  modified_base 31: mod_base = OTHER; note = 2'-O-methyl nucleotide
  modified_base 32: mod_base = OTHER; note = 2'-O-methyl nucleotide
  modified_base 33: mod_base = OTHER; note = 2'-O-methyl nucleotide
  modified_base 34: mod_base = OTHER; note = 2'-O-methyl nucleotide
  modified_base 35: mod_base = OTHER; note = 2'-O-methyl nucleotide
  modified_base 36: mod_base = OTHER; note = 2'-O-methyl nucleotide
  modified_base 37: mod_base = OTHER; note = 2'-O-methyl nucleotide
  modified_base 38: mod_base = OTHER; note = 2'-O-methyl nucleotide
  modified_base 39: mod_base = OTHER; note = 2'-O-methyl nucleotide
  modified_base 40: mod_base = OTHER; note = 2'-O-methyl nucleotide
  modified_base 88: mod_base = OTHER; note = 2'-O-methyl nucleotide, phosphorothioate linkage
  modified_base 89: mod_base = OTHER; note = 2'-O-methyl nucleotide, phosphorothioate linkage
  modified_base 90: mod_base = OTHER; note = 2'-O-methyl nucleotide, phosphorothioate linkage
  modified_base 91: mod_base = OTHER; note = 2'-O-methyl nucleotide
  source 1..91: mol_type = other RNA

SEQ ID NO: 349 - RNA, 91 nt, synthetic construct; identical to SEQ ID NO: 326
  misc_feature 1..91: note = Synthetic
  modified_base 1: mod_base = OTHER; note = 2'-O-methyl nucleotide, phosphorothioate linkage
  modified_base 2: mod_base = OTHER; note = 2'-O-methyl nucleotide, phosphorothioate linkage
  modified_base 3: mod_base = OTHER; note = 2'-O-methyl nucleotide, phosphorothioate linkage
  modified_base 29: mod_base = OTHER; note = 2'-O-methyl nucleotide
  modified_base 30: mod_base = OTHER; note = 2'-O-methyl nucleotide
  modified_base 31: mod_base = OTHER; note = 2'-O-methyl nucleotide
  modified_base 32: mod_base = OTHER; note = 2'-O-methyl nucleotide
  modified_base 33: mod_base = OTHER; note = 2'-O-methyl nucleotide
  modified_base 34: mod_base = OTHER; note = 2'-O-methyl nucleotide
  modified_base 35: mod_base = OTHER; note = 2'-O-methyl nucleotide
  modified_base 36: mod_base = OTHER; note = 2'-O-methyl nucleotide
  modified_base 37: mod_base = OTHER; note = 2'-O-methyl nucleotide
  modified_base 38: mod_base = OTHER; note = 2'-O-methyl nucleotide
  modified_base 39: mod_base = OTHER; note = 2'-O-methyl nucleotide
  modified_base 40: mod_base = OTHER; note = 2'-O-methyl nucleotide
  modified_base 88: mod_base = OTHER; note = 2'-O-methyl nucleotide, phosphorothioate linkage
  modified_base 89: mod_base = OTHER; note = 2'-O-methyl nucleotide, phosphorothioate linkage
  modified_base 90: mod_base = OTHER; note = 2'-O-methyl nucleotide, phosphorothioate linkage
  modified_base 91: mod_base = OTHER; note = 2'-O-methyl nucleotide
  source 1..91: mol_type = other RNA

SEQ ID NO: 350 - RNA, 91 nt, synthetic construct; identical to SEQ ID NO: 327
  misc_feature 1..91: note = Synthetic
  modified_base 1: mod_base = OTHER; note = 2'-O-methyl nucleotide, phosphorothioate linkage
  modified_base 2: mod_base = OTHER; note = 2'-O-methyl nucleotide, phosphorothioate linkage
  modified_base 3: mod_base = OTHER; note = 2'-O-methyl nucleotide, phosphorothioate linkage
  modified_base 29: mod_base = OTHER; note = 2'-O-methyl nucleotide
  modified_base 30: mod_base = OTHER; note = 2'-O-methyl nucleotide
  modified_base 31: mod_base = OTHER; note = 2'-O-methyl nucleotide
  modified_base 32: mod_base = OTHER; note = 2'-O-methyl nucleotide
  modified_base 33: mod_base = OTHER; note = 2'-O-methyl nucleotide
  modified_base 34: mod_base = OTHER; note = 2'-O-methyl nucleotide
  modified_base 35: mod_base = OTHER; note = 2'-O-methyl nucleotide
  modified_base 36: mod_base = OTHER; note = 2'-O-methyl nucleotide
  modified_base 37: mod_base = OTHER; note = 2'-O-methyl nucleotide
  modified_base 38: mod_base = OTHER; note = 2'-O-methyl nucleotide
  modified_base 39: mod_base = OTHER; note = 2'-O-methyl nucleotide
  modified_base 40: mod_base = OTHER; note = 2'-O-methyl nucleotide
  modified_base 88: mod_base = OTHER; note = 2'-O-methyl nucleotide, phosphorothioate linkage
  modified_base 89: mod_base = OTHER; note = 2'-O-methyl nucleotide, phosphorothioate linkage
  modified_base 90: mod_base = OTHER; note = 2'-O-methyl nucleotide, phosphorothioate linkage
  modified_base 91: mod_base = OTHER; note = 2'-O-methyl nucleotide
  source 1..91: mol_type = other RNA

SEQ ID NO: 351 - RNA, 91 nt, synthetic construct; identical to SEQ ID NO: 328
  misc_feature 1..91: note = Synthetic
  modified_base 1: mod_base = OTHER; note = 2'-O-methyl nucleotide, phosphorothioate linkage
  modified_base 2: mod_base = OTHER; note = 2'-O-methyl nucleotide, phosphorothioate linkage
  modified_base 3: mod_base = OTHER; note = 2'-O-methyl nucleotide, phosphorothioate linkage
  modified_base 29: mod_base = OTHER; note = 2'-O-methyl nucleotide
  modified_base 30: mod_base = OTHER; note = 2'-O-methyl nucleotide
  modified_base 31: mod_base = OTHER; note = 2'-O-methyl nucleotide
  modified_base 32: mod_base = OTHER; note = 2'-O-methyl nucleotide
  modified_base 33: mod_base = OTHER; note = 2'-O-methyl nucleotide
  modified_base 34: mod_base = OTHER; note = 2'-O-methyl nucleotide
  modified_base 35: mod_base = OTHER; note = 2'-O-methyl nucleotide
  modified_base 36: mod_base = OTHER; note = 2'-O-methyl nucleotide
  modified_base 37: mod_base = OTHER; note = 2'-O-methyl nucleotide
  modified_base 38: mod_base = OTHER; note = 2'-O-methyl nucleotide
  modified_base 39: mod_base = OTHER; note = 2'-O-methyl nucleotide
  modified_base 40: mod_base = OTHER; note = 2'-O-methyl nucleotide
  modified_base 88: mod_base = OTHER; note = 2'-O-methyl nucleotide, phosphorothioate linkage
  modified_base 89: mod_base = OTHER; note = 2'-O-methyl nucleotide, phosphorothioate linkage
  modified_base 90: mod_base = OTHER; note = 2'-O-methyl nucleotide, phosphorothioate linkage
  modified_base 91: mod_base = OTHER; note = 2'-O-methyl nucleotide
  source 1..91: mol_type = other RNA

SEQ ID NO: 352 - RNA, 91 nt, synthetic construct; identical to SEQ ID NO: 329
  misc_feature 1..91: note = Synthetic
  modified_base 1: mod_base = OTHER; note = 2'-O-methyl nucleotide, phosphorothioate linkage
  modified_base 2: mod_base = OTHER; note = 2'-O-methyl nucleotide, phosphorothioate linkage
  modified_base 3: mod_base = OTHER; note = 2'-O-methyl nucleotide, phosphorothioate linkage
  modified_base 29: mod_base = OTHER; note = 2'-O-methyl nucleotide
  modified_base 30: mod_base = OTHER; note = 2'-O-methyl nucleotide
  modified_base 31: mod_base = OTHER; note = 2'-O-methyl nucleotide
  modified_base 32: mod_base = OTHER; note = 2'-O-methyl nucleotide
  modified_base 33: mod_base = OTHER; note = 2'-O-methyl nucleotide
  modified_base 34: mod_base = OTHER; note = 2'-O-methyl nucleotide
  modified_base 35: mod_base = OTHER; note = 2'-O-methyl nucleotide
  modified_base 36: mod_base = OTHER; note = 2'-O-methyl nucleotide
  modified_base 37: mod_base = OTHER; note = 2'-O-methyl nucleotide
  modified_base 38: mod_base = OTHER; note = 2'-O-methyl nucleotide
  modified_base 39: mod_base = OTHER; note = 2'-O-methyl nucleotide
  modified_base 40: mod_base = OTHER; note = 2'-O-methyl nucleotide
  modified_base 88: mod_base = OTHER; note = 2'-O-methyl nucleotide, phosphorothioate linkage
  modified_base 89: mod_base = OTHER; note = 2'-O-methyl nucleotide, phosphorothioate linkage
  modified_base 90: mod_base = OTHER; note = 2'-O-methyl nucleotide, phosphorothioate linkage
  modified_base 91: mod_base = OTHER; note = 2'-O-methyl nucleotide
  source 1..91: mol_type = other RNA

SEQ ID NO: 353 - RNA, 101 nt, synthetic construct; identical to SEQ ID NO: 330
  misc_feature 1..101: note = Synthetic
  modified_base 1: mod_base = OTHER; note = 2'-O-methyl nucleotide, phosphorothioate linkage
  modified_base 2: mod_base = OTHER; note = 2'-O-methyl nucleotide, phosphorothioate linkage
  modified_base 3: mod_base = OTHER; note = 2'-O-methyl nucleotide, phosphorothioate linkage
  modified_base 4: mod_base = OTHER; note = 2'-O-methyl nucleotide
  modified_base 5: mod_base = OTHER; note = 2'-O-methyl nucleotide
  modified_base 8: mod_base = OTHER; note = 2'-O-methyl nucleotide
  modified_base 9: mod_base = OTHER; note = 2'-O-methyl nucleotide
  modified_base 11: mod_base = OTHER; note = 2'-O-methyl nucleotide
  modified_base 13: mod_base = OTHER; note = 2'-O-methyl nucleotide
  modified_base 18: mod_base = OTHER; note = 2'-O-methyl nucleotide
  modified_base 22: mod_base = OTHER; note = 2'-O-methyl nucleotide
  modified_base 25: mod_base = OTHER; note = 2'-O-methyl nucleotide
  modified_base 29: mod_base = OTHER; note = 2'-O-methyl nucleotide
  modified_base 30: mod_base = OTHER; note = 2'-O-methyl nucleotide
  modified_base 31: mod_base = OTHER; note = 2'-O-methyl nucleotide
  modified_base 32: mod_base = OTHER; note = 2'-O-methyl nucleotide
  modified_base 37: mod_base = OTHER; note = 2'-O-methyl nucleotide
  modified_base 38: mod_base = OTHER; note = 2'-O-methyl nucleotide
  modified_base 39: mod_base = OTHER; note = 2'-O-methyl nucleotide
  modified_base 40: mod_base = OTHER; note = 2'-O-methyl nucleotide
  modified_base 41: mod_base = OTHER; note = 2'-O-methyl nucleotide
  modified_base 42: mod_base = OTHER; note = 2'-O-methyl nucleotide
  modified_base 43: mod_base = OTHER; note = 2'-O-methyl nucleotide
  modified_base 47: mod_base = OTHER; note = 2'-O-methyl nucleotide
  modified_base 48: mod_base = OTHER; note = 2'-O-methyl nucleotide
  modified_base 51: mod_base = OTHER; note = 2'-O-methyl nucleotide
  modified_base 54: mod_base = OTHER; note = phosphorothioate linkage
  modified_base 58: mod_base = OTHER; note = 2'-O-methyl nucleotide
  modified_base 59: mod_base = OTHER; note = 2'-O-methyl nucleotide
  modified_base 61: mod_base = OTHER; note = 2'-O-methyl nucleotide
  modified_base 62: mod_base = OTHER; note = 2'-O-methyl nucleotide
  modified_base 63: mod_base = OTHER; note = 2'-O-methyl nucleotide
  modified_base 64: mod_base = OTHER; note = 2'-O-methyl nucleotide
  modified_base 65: mod_base = OTHER; note = 2'-O-methyl nucleotide
  modified_base 66: mod_base = OTHER; note = 2'-O-methyl nucleotide
  modified_base 67: mod_base = OTHER; note = 2'-O-methyl nucleotide
  modified_base 68: mod_base = OTHER; note = 2'-O-methyl nucleotide
  modified_base 69: mod_base = OTHER; note = 2'-O-methyl nucleotide
  modified_base 70: mod_base = OTHER; note = 2'-O-methyl nucleotide
  modified_base 75: mod_base = OTHER; note = 2'-O-methyl nucleotide
  modified_base 77: mod_base = OTHER; note = 2'-O-methyl nucleotide
  modified_base 80: mod_base = OTHER; note = 2'-O-methyl nucleotide
  modified_base 86: mod_base = OTHER; note = 2'-O-methyl nucleotide
  modified_base 87: mod_base = OTHER; note = 2'-O-methyl nucleotide
  modified_base 89: mod_base = OTHER; note = 2'-O-methyl nucleotide
  modified_base 90: mod_base = OTHER; note = 2'-O-methyl nucleotide
  modified_base 91: mod_base = OTHER; note = 2'-O-methyl nucleotide
  modified_base 92: mod_base = OTHER; note = 2'-O-methyl nucleotide
  modified_base 99: mod_base = OTHER; note = phosphorothioate linkage
  modified_base 100: mod_base = OTHER; note = 2'-O-methyl nucleotide, phosphorothioate linkage
  modified_base 101: mod_base = OTHER; note = 2'-O-methyl nucleotide
  source 1..101: mol_type = other RNA

SEQ ID NO: 354 - RNA, 101 nt, synthetic construct; identical to SEQ ID NO: 330
  misc_feature 1..101: note = Synthetic
  modified_base 1: mod_base = OTHER; note = 2'-O-methyl nucleotide, phosphorothioate linkage
  modified_base 2: mod_base = OTHER; note = 2'-O-methyl nucleotide, phosphorothioate linkage
  modified_base 3: mod_base = OTHER; note = 2'-O-methyl nucleotide, phosphorothioate linkage
  modified_base 4: mod_base = OTHER; note = 2'-O-methyl nucleotide
  modified_base 5: mod_base = OTHER; note = 2'-O-methyl nucleotide
  modified_base 8: mod_base = OTHER; note = 2'-O-methyl nucleotide
  modified_base 9: mod_base = OTHER; note = 2'-O-methyl nucleotide
  modified_base 11: mod_base = OTHER; note = 2'-O-methyl nucleotide
  modified_base 13: mod_base = OTHER; note = 2'-O-methyl nucleotide
  modified_base 18: mod_base = OTHER; note = 2'-O-methyl nucleotide
  modified_base 22: mod_base = OTHER; note = 2'-O-methyl nucleotide
  modified_base 25: mod_base = OTHER; note = 2'-O-methyl nucleotide
  modified_base 29: mod_base = OTHER; note = 2'-O-methyl nucleotide
  modified_base 30: mod_base = OTHER; note = 2'-O-methyl nucleotide
  modified_base 31: mod_base = OTHER; note = 2'-O-methyl nucleotide
  modified_base 32: mod_base = OTHER; note = 2'-O-methyl nucleotide
  modified_base 37: mod_base = OTHER; note = 2'-O-methyl nucleotide
  modified_base 38: mod_base = OTHER; note = 2'-O-methyl nucleotide
  modified_base 39: mod_base = OTHER; note = 2'-O-methyl nucleotide
  modified_base 40: mod_base = OTHER; note = 2'-O-methyl nucleotide
  modified_base 41: mod_base = OTHER; note = 2'-O-methyl nucleotide
  modified_base 42: mod_base = OTHER; note = 2'-O-methyl nucleotide
  modified_base 43: mod_base = OTHER; note = 2'-O-methyl nucleotide
  modified_base 47: mod_base = OTHER; note = 2'-O-methyl nucleotide
  modified_base 48: mod_base = OTHER; note = 2'-O-methyl nucleotide
  modified_base 51: mod_base = OTHER; note = 2'-O-methyl nucleotide
  modified_base 58: mod_base = OTHER; note = 2'-O-methyl nucleotide
  modified_base 59: mod_base = OTHER; note = 2'-O-methyl nucleotide
  modified_base 61: mod_base = OTHER; note = 2'-O-methyl nucleotide
  modified_base 62: mod_base = OTHER; note = 2'-O-methyl nucleotide
  modified_base 63: mod_base = OTHER; note = 2'-O-methyl nucleotide
  modified_base 64: mod_base = OTHER; note = 2'-O-methyl nucleotide
  modified_base 65: mod_base = OTHER; note = 2'-O-methyl nucleotide
  modified_base 66: mod_base = OTHER; note = 2'-O-methyl nucleotide
  modified_base 67: mod_base = OTHER; note = 2'-O-methyl nucleotide
  modified_base 68: mod_base = OTHER; note = 2'-O-methyl nucleotide
  modified_base 69: mod_base = OTHER; note = 2'-O-methyl nucleotide
  modified_base 70: mod_base = OTHER; note = 2'-O-methyl nucleotide
  modified_base 75: mod_base = OTHER; note = 2'-O-methyl nucleotide
  modified_base 77: mod_base = OTHER; note = 2'-O-methyl nucleotide
  modified_base 80: mod_base = OTHER; note = 2'-O-methyl nucleotide
  modified_base 86: mod_base = OTHER; note = 2'-O-methyl nucleotide
  modified_base 87: mod_base = OTHER; note = 2'-O-methyl nucleotide
  modified_base 89: mod_base = OTHER; note = 2'-O-methyl nucleotide
  modified_base 90: mod_base = OTHER; note = 2'-O-methyl nucleotide
  modified_base 91: mod_base = OTHER; note = 2'-O-methyl nucleotide
  modified_base 92: mod_base = OTHER; note = 2'-O-methyl nucleotide
  modified_base 99: mod_base = OTHER; note = phosphorothioate linkage
  modified_base 100: mod_base = OTHER; note = 2'-O-methyl nucleotide, phosphorothioate linkage
  modified_base 101: mod_base = OTHER; note = 2'-O-methyl nucleotide
  source 1..101: mol_type = other RNA

SEQ ID NO: 355 - RNA, 101 nt, synthetic construct; identical to SEQ ID NO: 331
  misc_feature 1..101: note = Synthetic
  modified_base 1: mod_base = OTHER; note = 2'-O-methyl nucleotide, phosphorothioate linkage
  modified_base 2: mod_base = OTHER; note = 2'-O-methyl nucleotide, phosphorothioate linkage
  modified_base 3: mod_base = OTHER; note = 2'-O-methyl nucleotide, phosphorothioate linkage
  modified_base 4: mod_base = OTHER; note = 2'-O-methyl nucleotide
  modified_base 5: mod_base = OTHER; note = 2'-O-methyl nucleotide
  modified_base 8: mod_base = OTHER; note = 2'-O-methyl nucleotide
  modified_base 9: mod_base = OTHER; note = 2'-O-methyl nucleotide
  modified_base 11: mod_base = OTHER; note = 2'-O-methyl nucleotide
  modified_base 13: mod_base = OTHER; note = 2'-O-methyl nucleotide
  modified_base 18: mod_base = OTHER; note = 2'-O-methyl nucleotide
  modified_base 22: mod_base = OTHER; note = 2'-O-methyl nucleotide
  modified_base 25: mod_base = OTHER; note = 2'-O-methyl nucleotide
  modified_base 29: mod_base = OTHER; note = 2'-O-methyl nucleotide
  modified_base 30: mod_base = OTHER; note = 2'-O-methyl nucleotide
  modified_base 31: mod_base = OTHER; note = 2'-O-methyl nucleotide
  modified_base 32: mod_base = OTHER; note = 2'-O-methyl nucleotide
  modified_base 37: mod_base = OTHER; note = 2'-O-methyl nucleotide
  modified_base 38: mod_base = OTHER; note = 2'-O-methyl nucleotide
  modified_base 39: mod_base = OTHER; note = 2'-O-methyl nucleotide
  modified_base 40: mod_base = OTHER; note = 2'-O-methyl nucleotide
  modified_base 41: mod_base = OTHER; note = 2'-O-methyl nucleotide
  modified_base 42: mod_base = OTHER; note = 2'-O-methyl nucleotide
  modified_base 43: mod_base = OTHER; note = 2'-O-methyl nucleotide
  modified_base 47: mod_base = OTHER; note = 2'-O-methyl nucleotide
  modified_base 48: mod_base = OTHER; note = 2'-O-methyl nucleotide
  modified_base 51: mod_base = OTHER; note = 2'-O-methyl nucleotide
  modified_base 54: mod_base = OTHER; note = phosphorothioate linkage
  modified_base 58: mod_base = OTHER; note = 2'-O-methyl nucleotide
  modified_base 59: mod_base = OTHER; note = 2'-O-methyl nucleotide
  modified_base 61: mod_base = OTHER; note = 2'-O-methyl nucleotide
  modified_base 62: mod_base = OTHER; note = 2'-O-methyl nucleotide
  modified_base 63: mod_base = OTHER; note = 2'-O-methyl nucleotide
  modified_base 64: mod_base = OTHER; note = 2'-O-methyl nucleotide
  modified_base 65: mod_base = OTHER; note = 2'-O-methyl nucleotide
  modified_base 66: mod_base = OTHER; note = 2'-O-methyl nucleotide
  modified_base 67: mod_base = OTHER; note = 2'-O-methyl nucleotide
  modified_base 68: mod_base = OTHER; note = 2'-O-methyl nucleotide
  modified_base 69: mod_base = OTHER; note = 2'-O-methyl nucleotide
  modified_base 70: mod_base = OTHER; note = 2'-O-methyl nucleotide
  modified_base 75: mod_base = OTHER; note = 2'-O-methyl nucleotide
  modified_base 77: mod_base = OTHER; note = 2'-O-methyl nucleotide
  modified_base 80: mod_base = OTHER; note = 2'-O-methyl nucleotide
  modified_base 86: mod_base = OTHER; note = 2'-O-methyl nucleotide
  modified_base 87: mod_base = OTHER; note = 2'-O-methyl nucleotide
  modified_base 89: mod_base = OTHER; note = 2'-O-methyl nucleotide
  modified_base 90: mod_base = OTHER; note = 2'-O-methyl nucleotide
  modified_base 91: mod_base = OTHER; note = 2'-O-methyl nucleotide
  modified_base 92: mod_base = OTHER; note = 2'-O-methyl nucleotide
  modified_base 99: mod_base = OTHER; note = phosphorothioate linkage
  modified_base 100: mod_base = OTHER; note = 2'-O-methyl nucleotide, phosphorothioate linkage
  modified_base 101: mod_base = OTHER; note = 2'-O-methyl nucleotide
  source 1..101: mol_type = other RNA

SEQ ID NO: 356 - RNA, 101 nt, synthetic construct; identical to SEQ ID NO: 331
  misc_feature 1..101: note = Synthetic
  modified_base 1: mod_base = OTHER; note = 2'-O-methyl nucleotide, phosphorothioate linkage
  modified_base 2: mod_base = OTHER; note = 2'-O-methyl nucleotide, phosphorothioate linkage
  modified_base 3: mod_base = OTHER; note = 2'-O-methyl nucleotide, phosphorothioate linkage
  modified_base 4: mod_base = OTHER; note = 2'-O-methyl nucleotide
  modified_base 5: mod_base = OTHER; note = 2'-O-methyl nucleotide
  modified_base 8: mod_base = OTHER; note = 2'-O-methyl nucleotide
  modified_base 9: mod_base = OTHER; note = 2'-O-methyl nucleotide
  modified_base 11: mod_base = OTHER; note = 2'-O-methyl nucleotide
  modified_base 13: mod_base = OTHER; note = 2'-O-methyl nucleotide
  modified_base 18: mod_base = OTHER; note = 2'-O-methyl nucleotide
  modified_base 22: mod_base = OTHER; note = 2'-O-methyl nucleotide
  modified_base 25: mod_base = OTHER; note = 2'-O-methyl nucleotide
  modified_base 29: mod_base = OTHER; note = 2'-O-methyl nucleotide
  modified_base 30: mod_base = OTHER; note = 2'-O-methyl nucleotide
  modified_base 31: mod_base = OTHER; note = 2'-O-methyl nucleotide
  modified_base 32: mod_base = OTHER; note = 2'-O-methyl nucleotide
  modified_base 37: mod_base = OTHER; note = 2'-O-methyl nucleotide
  modified_base 38: mod_base = OTHER; note = 2'-O-methyl nucleotide
  modified_base 39: mod_base = OTHER; note = 2'-O-methyl nucleotide
  modified_base 40: mod_base = OTHER; note = 2'-O-methyl nucleotide
  modified_base 41: mod_base = OTHER; note = 2'-O-methyl nucleotide
  modified_base 42: mod_base = OTHER; note = 2'-O-methyl nucleotide
  modified_base 43: mod_base = OTHER; note = 2'-O-methyl nucleotide
  modified_base 47: mod_base = OTHER; note = 2'-O-methyl nucleotide
  modified_base 48: mod_base = OTHER; note = 2'-O-methyl nucleotide
  modified_base 51: mod_base = OTHER; note = 2'-O-methyl nucleotide
  modified_base 58: mod_base = OTHER; note = 2'-O-methyl nucleotide
  modified_base 59: mod_base = OTHER; note = 2'-O-methyl nucleotide
  modified_base 61: mod_base = OTHER; note = 2'-O-methyl nucleotide
  modified_base 62: mod_base = OTHER; note = 2'-O-methyl nucleotide
  modified_base 63: mod_base = OTHER; note = 2'-O-methyl nucleotide
  modified_base 64: mod_base = OTHER; note = 2'-O-methyl nucleotide
  modified_base 65: mod_base = OTHER; note = 2'-O-methyl nucleotide
  modified_base 66: mod_base = OTHER; note = 2'-O-methyl nucleotide
  modified_base 67: mod_base = OTHER; note = 2'-O-methyl nucleotide
  modified_base 68: mod_base = OTHER; note = 2'-O-methyl nucleotide
  modified_base 69: mod_base = OTHER; note = 2'-O-methyl nucleotide
  modified_base 70: mod_base = OTHER; note = 2'-O-methyl nucleotide
  modified_base 75: mod_base = OTHER; note = 2'-O-methyl nucleotide
  modified_base 77: mod_base = OTHER; note = 2'-O-methyl nucleotide
  modified_base 80: mod_base = OTHER; note = 2'-O-methyl nucleotide
  modified_base 86: mod_base = OTHER; note = 2'-O-methyl nucleotide
  modified_base 87: mod_base = OTHER; note = 2'-O-methyl nucleotide
  modified_base 89: mod_base = OTHER; note = 2'-O-methyl nucleotide
  modified_base 90: mod_base = OTHER; note = 2'-O-methyl nucleotide
  modified_base 91: mod_base = OTHER; note = 2'-O-methyl nucleotide
  modified_base 92: mod_base = OTHER; note = 2'-O-methyl nucleotide
  modified_base 99: mod_base = OTHER; note = phosphorothioate linkage
  modified_base 100: mod_base = OTHER; note = 2'-O-methyl nucleotide, phosphorothioate linkage
  modified_base 101: mod_base = OTHER; note = 2'-O-methyl nucleotide
  source 1..101: mol_type = other RNA

SEQ ID NO: 357 - RNA, 100 nt, synthetic construct; identical to SEQ ID NO: 332
  misc_feature 1..100: note = Synthetic
  modified_base 1: mod_base = OTHER; note = 2'-O-methyl nucleotide, phosphorothioate linkage
  modified_base 2: mod_base = OTHER; note = 2'-O-methyl nucleotide, phosphorothioate linkage
  modified_base 3: mod_base = OTHER; note = 2'-O-methyl nucleotide, phosphorothioate linkage
  modified_base 29: mod_base = OTHER; note = 2'-O-methyl nucleotide
  modified_base 30: mod_base = OTHER; note = 2'-O-methyl nucleotide
  modified_base 31: mod_base = OTHER; note = 2'-O-methyl nucleotide
  modified_base 32: mod_base = OTHER; note = 2'-O-methyl nucleotide
  modified_base 33: mod_base = OTHER; note = 2'-O-methyl nucleotide
  modified_base 34: mod_base = OTHER; note = 2'-O-methyl nucleotide
  modified_base 35: mod_base = OTHER; note = 2'-O-methyl nucleotide
  modified_base 36: mod_base = OTHER; note = 2'-O-methyl nucleotide
  modified_base 37: mod_base = OTHER; note = 2'-O-methyl nucleotide
  modified_base 38: mod_base = OTHER; note = 2'-O-methyl nucleotide
  modified_base 39: mod_base = OTHER; note = 2'-O-methyl nucleotide
  modified_base 40: mod_base = OTHER; note = 2'-O-methyl nucleotide
  modified_base 69: mod_base = OTHER; note = 2'-O-methyl nucleotide
  modified_base 70: mod_base = OTHER; note = 2'-O-methyl nucleotide
  modified_base 71: mod_base = OTHER; note = 2'-O-methyl nucleotide
  modified_base 72: mod_base = OTHER; note = 2'-O-methyl nucleotide
  modified_base 73: mod_base = OTHER; note = 2'-O-methyl nucleotide
  modified_base 74: mod_base = OTHER; note = 2'-O-methyl nucleotide
  modified_base 75: mod_base = OTHER; note = 2'-O-methyl nucleotide
  modified_base 76: mod_base = OTHER; note = 2'-O-methyl nucleotide
  modified_base 77: mod_base = OTHER; note = 2'-O-methyl nucleotide
  modified_base 78: mod_base = OTHER; note = 2'-O-methyl nucleotide
  modified_base 79: mod_base = OTHER; note = 2'-O-methyl nucleotide
  modified_base 80: mod_base = OTHER; note = 2'-O-methyl nucleotide
  modified_base 81: mod_base = OTHER; note = 2'-O-methyl nucleotide
  modified_base 82: mod_base = OTHER; note = 2'-O-methyl nucleotide
  modified_base 83: mod_base = OTHER; note = 2'-O-methyl nucleotide
  modified_base 84: mod_base = OTHER; note = 2'-O-methyl nucleotide
  modified_base 85: mod_base = OTHER; note = 2'-O-methyl nucleotide
  modified_base 86: mod_base = OTHER; note = 2'-O-methyl nucleotide
  modified_base 87: mod_base = OTHER; note = 2'-O-methyl nucleotide
  modified_base 88: mod_base = OTHER; note = 2'-O-methyl nucleotide
  modified_base 89: mod_base = OTHER; note = 2'-O-methyl nucleotide
  modified_base 90: mod_base = OTHER; note = 2'-O-methyl nucleotide
  modified_base 91: mod_base = OTHER; note = 2'-O-methyl nucleotide
  modified_base 92: mod_base = OTHER; note = 2'-O-methyl nucleotide
  modified_base 93: mod_base = OTHER; note = 2'-O-methyl nucleotide
  modified_base 94: mod_base = OTHER; note = 2'-O-methyl nucleotide
  modified_base 95: mod_base = OTHER; note = 2'-O-methyl nucleotide
  modified_base 96: mod_base = OTHER; note = 2'-O-methyl nucleotide
  modified_base 97: mod_base = OTHER; note = 2'-O-methyl nucleotide, phosphorothioate linkage
  modified_base 98: mod_base = OTHER; note = 2'-O-methyl nucleotide, phosphorothioate linkage
  modified_base 99: mod_base = OTHER; note = 2'-O-methyl nucleotide, phosphorothioate linkage
  modified_base 100: mod_base = OTHER; note = 2'-O-methyl nucleotide
  source 1..100: mol_type = other RNA

SEQ ID NO: 358 - RNA, 91 nt, synthetic construct
  misc_feature 1..91: note = Synthetic
  modified_base 1: mod_base = OTHER; note = 2'-O-methyl nucleotide, phosphorothioate linkage
  modified_base 2: mod_base = OTHER; note = 2'-O-methyl nucleotide, phosphorothioate linkage
  modified_base 3: mod_base = OTHER; note = 2'-O-methyl nucleotide, phosphorothioate linkage
  modified_base 29: mod_base = OTHER; note = 2'-O-methyl nucleotide
  modified_base 30: mod_base = OTHER; note = 2'-O-methyl nucleotide
  modified_base 31: mod_base = OTHER; note = 2'-O-methyl nucleotide
  modified_base 32: mod_base = OTHER; note = 2'-O-methyl nucleotide
  modified_base 33: mod_base = OTHER; note = 2'-O-methyl nucleotide
  modified_base 34: mod_base = OTHER; note = 2'-O-methyl nucleotide
  modified_base 35: mod_base = OTHER; note = 2'-O-methyl nucleotide
  modified_base 36: mod_base = OTHER; note = 2'-O-methyl nucleotide
  modified_base 37: mod_base = OTHER; note = 2'-O-methyl nucleotide
  modified_base 38: mod_base = OTHER; note = 2'-O-methyl nucleotide
  modified_base 39: mod_base = OTHER; note = 2'-O-methyl nucleotide
  modified_base 40: mod_base = OTHER; note = 2'-O-methyl nucleotide
  modified_base 88: mod_base = OTHER; note = 2'-O-methyl nucleotide, phosphorothioate linkage
  modified_base 89: mod_base = OTHER; note = 2'-O-methyl nucleotide, phosphorothioate linkage
  modified_base 90: mod_base = OTHER; note = 2'-O-methyl nucleotide, phosphorothioate linkage
  modified_base 91: mod_base = OTHER; note = 2'-O-methyl nucleotide
  source 1..91: mol_type = other RNA
ggtgatcgccgcggcgatgcgttttagagctagaaatagcaagttaaaataaggctagtccgttatcacgaaagggcaccgagtcggtgct

SEQ ID NO: 359 - RNA, 100 nt, synthetic construct; identical to SEQ ID NO: 333
  misc_feature 1..100: note = Synthetic
  modified_base 1: mod_base = OTHER; note = 2'-O-methyl nucleotide, phosphorothioate linkage
  modified_base 2: mod_base = OTHER; note = 2'-O-methyl nucleotide, phosphorothioate linkage
  modified_base 3: mod_base = OTHER; note = 2'-O-methyl nucleotide, phosphorothioate linkage
  modified_base 29: mod_base = OTHER; note = 2'-O-methyl nucleotide
  modified_base 30: mod_base = OTHER; note = 2'-O-methyl nucleotide
  modified_base 31: mod_base = OTHER; note = 2'-O-methyl nucleotide
  modified_base 32: mod_base = OTHER; note = 2'-O-methyl nucleotide
  modified_base 33: mod_base = OTHER; note = 2'-O-methyl nucleotide
  modified_base 34: mod_base = OTHER; note = 2'-O-methyl nucleotide
  modified_base 35: mod_base = OTHER; note = 2'-O-methyl nucleotide
  modified_base 36: mod_base = OTHER; note = 2'-O-methyl nucleotide
  modified_base 37: mod_base = OTHER; note = 2'-O-methyl nucleotide
  modified_base 38: mod_base = OTHER; note = 2'-O-methyl nucleotide
  modified_base 39: mod_base = OTHER; note = 2'-O-methyl nucleotide
  modified_base 40: mod_base = OTHER; note = 2'-O-methyl nucleotide
  modified_base 69: mod_base = OTHER; note = 2'-O-methyl nucleotide
  modified_base 70: mod_base = OTHER; note = 2'-O-methyl nucleotide
  modified_base 71: mod_base = OTHER; note = 2'-O-methyl nucleotide
  modified_base 72: mod_base = OTHER; note = 2'-O-methyl nucleotide
  modified_base 73: mod_base = OTHER; note = 2'-O-methyl nucleotide
  modified_base 74: mod_base = OTHER; note = 2'-O-methyl nucleotide
  modified_base 75: mod_base = OTHER; note = 2'-O-methyl nucleotide
  modified_base 76: mod_base = OTHER; note = 2'-O-methyl nucleotide
  modified_base 77: mod_base = OTHER; note = 2'-O-methyl nucleotide
  modified_base 78: mod_base = OTHER; note = 2'-O-methyl nucleotide
  modified_base 79: mod_base = OTHER; note = 2'-O-methyl nucleotide
  modified_base 80: mod_base = OTHER; note = 2'-O-methyl nucleotide
  modified_base 81: mod_base = OTHER; note = 2'-O-methyl nucleotide
  modified_base 82: mod_base = OTHER; note = 2'-O-methyl nucleotide
  modified_base 83: mod_base = OTHER; note = 2'-O-methyl nucleotide
  modified_base 84: mod_base = OTHER; note = 2'-O-methyl nucleotide
  modified_base 85: mod_base = OTHER; note = 2'-O-methyl nucleotide
  modified_base 86: mod_base = OTHER; note = 2'-O-methyl nucleotide
  modified_base 87: mod_base = OTHER; note = 2'-O-methyl nucleotide
  modified_base 88: mod_base = OTHER; note = 2'-O-methyl nucleotide
  modified_base 89: mod_base = OTHER; note = 2'-O-methyl nucleotide
  modified_base 90: mod_base = OTHER; note = 2'-O-methyl nucleotide
  modified_base 91: mod_base = OTHER; note = 2'-O-methyl nucleotide
  modified_base 92: mod_base = OTHER; note = 2'-O-methyl nucleotide
  modified_base 93: mod_base = OTHER; note = 2'-O-methyl nucleotide
  modified_base 94: mod_base = OTHER; note = 2'-O-methyl nucleotide
  modified_base 95: mod_base = OTHER; note = 2'-O-methyl nucleotide
  modified_base 96: mod_base = OTHER; note = 2'-O-methyl nucleotide
  modified_base 97: mod_base = OTHER; note = 2'-O-methyl nucleotide, phosphorothioate linkage
  modified_base 98: mod_base = OTHER; note = 2'-O-methyl nucleotide, phosphorothioate linkage
  modified_base 99: mod_base = OTHER; note = 2'-O-methyl nucleotide, phosphorothioate linkage
  modified_base 100: mod_base = OTHER; note = 2'-O-methyl nucleotide
  source 1..100: mol_type = other RNA

SEQ ID NO: 360 - RNA, 91 nt, synthetic construct
  misc_feature 1..91: note = Synthetic
  modified_base 1: mod_base = OTHER; note = 2'-O-methyl nucleotide, phosphorothioate linkage
  modified_base 2: mod_base = OTHER; note = 2'-O-methyl nucleotide, phosphorothioate linkage
  modified_base 3: mod_base = OTHER; note = 2'-O-methyl nucleotide, phosphorothioate linkage
  modified_base 29: mod_base = OTHER; note = 2'-O-methyl nucleotide
  modified_base 30: mod_base = OTHER; note = 2'-O-methyl nucleotide
  modified_base 31: mod_base = OTHER; note = 2'-O-methyl nucleotide
  modified_base 32: mod_base = OTHER; note = 2'-O-methyl nucleotide
  modified_base 33: mod_base = OTHER; note = 2'-O-methyl nucleotide
  modified_base 34: mod_base = OTHER; note = 2'-O-methyl nucleotide
  modified_base 35: mod_base = OTHER; note = 2'-O-methyl nucleotide
  modified_base 36: mod_base = OTHER; note = 2'-O-methyl nucleotide
  modified_base 37: mod_base = OTHER; note = 2'-O-methyl nucleotide
  modified_base 38: mod_base = OTHER; note = 2'-O-methyl nucleotide
  modified_base 39: mod_base = OTHER; note = 2'-O-methyl nucleotide
  modified_base 40: mod_base = OTHER; note = 2'-O-methyl nucleotide
  modified_base 88: mod_base = OTHER; note = 2'-O-methyl nucleotide, phosphorothioate linkage
  modified_base 89: mod_base = OTHER; note = 2'-O-methyl nucleotide, phosphorothioate linkage
  modified_base 90: mod_base = OTHER; note = 2'-O-methyl nucleotide, phosphorothioate linkage
  modified_base 91: mod_base = OTHER; note = 2'-O-methyl nucleotide
  source 1..91: mol_type = other RNA
gccgcggcgatgccggaggagttttagagctagaaatagcaagttaaaataaggctagtccgttatcacgaaagggcaccgagtcggtgct

SEQ ID NO: 361 - RNA, 91 nt, synthetic construct; identical to SEQ ID NO: 334
  misc_feature 1..91: note = Synthetic
  modified_base 1: mod_base = OTHER; note = 2'-O-methyl nucleotide, phosphorothioate linkage
  modified_base 2: mod_base = OTHER; note = 2'-O-methyl nucleotide, phosphorothioate linkage
  modified_base 3: mod_base = OTHER; note = 2'-O-methyl nucleotide, phosphorothioate linkage
  modified_base 29: mod_base = OTHER; note = 2'-O-methyl nucleotide
  modified_base 30: mod_base = OTHER; note = 2'-O-methyl nucleotide
  modified_base 31: mod_base = OTHER; note = 2'-O-methyl nucleotide
  modified_base 32: mod_base = OTHER; note = 2'-O-methyl nucleotide
  modified_base 33: mod_base = OTHER; note = 2'-O-methyl nucleotide
  modified_base 34: mod_base = OTHER; note = 2'-O-methyl nucleotide
  modified_base 35: mod_base = OTHER; note = 2'-O-methyl nucleotide
  modified_base 36: mod_base = OTHER; note = 2'-O-methyl nucleotide
  modified_base 37: mod_base = OTHER; note = 2'-O-methyl nucleotide
  modified_base 38: mod_base = OTHER; note = 2'-O-methyl nucleotide
  modified_base 39: mod_base = OTHER; note = 2'-O-methyl nucleotide
  modified_base 40: mod_base = OTHER; note = 2'-O-methyl nucleotide
  modified_base 88: mod_base = OTHER; note = 2'-O-methyl nucleotide, phosphorothioate linkage
  modified_base 89: mod_base = OTHER; note = 2'-O-methyl nucleotide, phosphorothioate linkage
  modified_base 90: mod_base = OTHER; note = 2'-O-methyl nucleotide, phosphorothioate linkage
  modified_base 91: mod_base = OTHER; note = 2'-O-methyl nucleotide
  source 1..91: mol_type = other RNA

SEQ ID NO: 362 - RNA, 91 nt, synthetic construct; identical to SEQ ID NO: 335
  misc_feature 1..91: note = Synthetic
  modified_base 1: mod_base = OTHER; note = 2'-O-methyl nucleotide, phosphorothioate linkage
  modified_base 2: mod_base = OTHER; note = 2'-O-methyl nucleotide, phosphorothioate linkage
  modified_base 3: mod_base = OTHER; note = 2'-O-methyl nucleotide, phosphorothioate linkage
  modified_base 29: mod_base = OTHER; note = 2'-O-methyl nucleotide
  modified_base 30: mod_base = OTHER; note = 2'-O-methyl nucleotide
  modified_base 31: mod_base = OTHER; note = 2'-O-methyl nucleotide
  modified_base 32: mod_base = OTHER; note = 2'-O-methyl nucleotide
  modified_base 33: mod_base = OTHER; note = 2'-O-methyl nucleotide
  modified_base 34: mod_base = OTHER; note = 2'-O-methyl nucleotide
  modified_base 35: mod_base = OTHER; note = 2'-O-methyl nucleotide
  modified_base 36: mod_base = OTHER; note = 2'-O-methyl nucleotide
  modified_base 37: mod_base = OTHER; note = 2'-O-methyl nucleotide
  modified_base 38: mod_base = OTHER; note = 2'-O-methyl nucleotide
  modified_base 39: mod_base = OTHER; note = 2'-O-methyl nucleotide
  modified_base 40: mod_base = OTHER; note = 2'-O-methyl nucleotide
  modified_base 88: mod_base = OTHER; note = 2'-O-methyl nucleotide, phosphorothioate linkage
  modified_base 89: mod_base = OTHER; note = 2'-O-methyl nucleotide, phosphorothioate linkage
  modified_base 90: mod_base = OTHER; note = 2'-O-methyl nucleotide, phosphorothioate linkage
  modified_base 91: mod_base = OTHER; note = 2'-O-methyl nucleotide
  source 1..91: mol_type = other RNA

SEQ ID NO: 363 - RNA, 91 nt, synthetic construct; identical to SEQ ID NO: 336
  misc_feature 1..91: note = Synthetic
  modified_base 1: mod_base = OTHER; note = 2'-O-methyl nucleotide, phosphorothioate linkage
  modified_base 2: mod_base = OTHER; note = 2'-O-methyl nucleotide, phosphorothioate linkage
  modified_base 3: mod_base = OTHER; note = 2'-O-methyl nucleotide, phosphorothioate linkage
  modified_base 29: mod_base = OTHER; note = 2'-O-methyl nucleotide
  modified_base 30: mod_base = OTHER; note = 2'-O-methyl nucleotide
  modified_base 31: mod_base = OTHER; note = 2'-O-methyl nucleotide
  modified_base 32: mod_base = OTHER; note = 2'-O-methyl nucleotide
  modified_base 33: mod_base = OTHER; note = 2'-O-methyl nucleotide
  modified_base 34: mod_base = OTHER; note = 2'-O-methyl nucleotide
  modified_base 35: mod_base = OTHER; note = 2'-O-methyl nucleotide
  modified_base 36: mod_base = OTHER; note = 2'-O-methyl nucleotide
  modified_base 37: mod_base = OTHER; note = 2'-O-methyl nucleotide
  modified_base 38: mod_base = OTHER; note = 2'-O-methyl nucleotide
  modified_base 39: mod_base = OTHER; note = 2'-O-methyl nucleotide
  modified_base 40: mod_base = OTHER; note = 2'-O-methyl nucleotide
  modified_base 88: mod_base = OTHER; note = 2'-O-methyl nucleotide, phosphorothioate linkage
  modified_base 89: mod_base = OTHER; note = 2'-O-methyl nucleotide, phosphorothioate linkage
  modified_base 90: mod_base = OTHER; note = 2'-O-methyl nucleotide, phosphorothioate linkage
  modified_base 91: mod_base = OTHER; note = 2'-O-methyl nucleotide
  source 1..91: mol_type = other RNA

SEQ ID NO: 364 - RNA, 91 nt, synthetic construct; identical to SEQ ID NO: 337
  misc_feature 1..91: note = Synthetic
  modified_base 1: mod_base = OTHER; note = 2'-O-methyl nucleotide, phosphorothioate linkage
  modified_base 2: mod_base = OTHER; note = 2'-O-methyl nucleotide, phosphorothioate linkage
  modified_base 3: mod_base = OTHER; note = 2'-O-methyl nucleotide, phosphorothioate linkage
  modified_base 29: mod_base = OTHER; note = 2'-O-methyl nucleotide
  modified_base 30: mod_base = OTHER; note = 2'-O-methyl nucleotide
  modified_base 31: mod_base = OTHER; note = 2'-O-methyl nucleotide
  modified_base 32: mod_base = OTHER; note = 2'-O-methyl nucleotide
  modified_base 33: mod_base = OTHER; note = 2'-O-methyl nucleotide
  modified_base 34: mod_base = OTHER; note = 2'-O-methyl nucleotide
  modified_base 35: mod_base = OTHER; note = 2'-O-methyl nucleotide
  modified_base 36: mod_base = OTHER; note = 2'-O-methyl nucleotide
  modified_base 37: mod_base = OTHER; note = 2'-O-methyl nucleotide
  modified_base 38: mod_base = OTHER; note = 2'-O-methyl nucleotide
  modified_base 39: mod_base = OTHER; note = 2'-O-methyl nucleotide
  modified_base 40: mod_base = OTHER; note = 2'-O-methyl nucleotide
  modified_base 88: mod_base = OTHER; note = 2'-O-methyl nucleotide, phosphorothioate linkage
  modified_base 89: mod_base = OTHER; note = 2'-O-methyl nucleotide, phosphorothioate linkage
  modified_base 90: mod_base = OTHER; note = 2'-O-methyl nucleotide, phosphorothioate linkage
  modified_base 91: mod_base = OTHER; note = 2'-O-methyl nucleotide
  source 1..91: mol_type = other RNA

SEQ ID NO: 365 - RNA, 91 nt, synthetic construct; identical to SEQ ID NO: 338
  misc_feature 1..91: note = Synthetic
  modified_base 1: mod_base = OTHER; note = 2'-O-methyl nucleotide, phosphorothioate linkage
  modified_base 2: mod_base = OTHER; note = 2'-O-methyl nucleotide, phosphorothioate linkage
  modified_base 3: mod_base = OTHER; note = 2'-O-methyl nucleotide, phosphorothioate linkage
  modified_base 29: mod_base = OTHER; note = 2'-O-methyl nucleotide
  modified_base 30: mod_base = OTHER; note = 2'-O-methyl nucleotide
  modified_base 31: mod_base = OTHER; note = 2'-O-methyl nucleotide
  modified_base 32: mod_base = OTHER; note = 2'-O-methyl nucleotide
  modified_base 33: mod_base = OTHER; note = 2'-O-methyl nucleotide
  modified_base 34: mod_base = OTHER; note = 2'-O-methyl nucleotide
  modified_base 35: mod_base = OTHER; note = 2'-O-methyl nucleotide
  modified_base 36: mod_base = OTHER; note = 2'-O-methyl nucleotide
  modified_base 37: mod_base = OTHER; note = 2'-O-methyl nucleotide
  modified_base 38: mod_base = OTHER; note = 2'-O-methyl nucleotide
  modified_base 39: mod_base = OTHER; note = 2'-O-methyl nucleotide
  modified_base 40: mod_base = OTHER; note = 2'-O-methyl nucleotide
  modified_base 88: mod_base = OTHER; note = 2'-O-methyl nucleotide, phosphorothioate linkage
  modified_base 89: mod_base = OTHER; note = 2'-O-methyl nucleotide, phosphorothioate linkage
  modified_base 90: mod_base = OTHER; note = 2'-O-methyl nucleotide, phosphorothioate linkage
  modified_base 91: mod_base = OTHER; note = 2'-O-methyl nucleotide
  source 1..91: mol_type = other RNA

SEQ ID NO: 366 - RNA, 91 nt, synthetic construct; identical to SEQ ID NO: 339
  misc_feature 1..91: note = Synthetic
  modified_base 1: mod_base = OTHER; note = 2'-O-methyl nucleotide, phosphorothioate linkage
  modified_base 2: mod_base = OTHER; note = 2'-O-methyl nucleotide, phosphorothioate linkage
  modified_base 3: mod_base = OTHER; note = 2'-O-methyl nucleotide, phosphorothioate linkage
  modified_base 29: mod_base = OTHER; note = 2'-O-methyl nucleotide
  modified_base 30: mod_base = OTHER; note = 2'-O-methyl nucleotide
  modified_base 31: mod_base = OTHER; note = 2'-O-methyl nucleotide
  modified_base 32: mod_base = OTHER; note = 2'-O-methyl nucleotide
  modified_base 33: mod_base = OTHER; note = 2'-O-methyl nucleotide
  modified_base 34: mod_base = OTHER; note = 2'-O-methyl nucleotide
  modified_base 35: mod_base = OTHER; note = 2'-O-methyl nucleotide
  modified_base 36: mod_base = OTHER; note = 2'-O-methyl nucleotide
  modified_base 37: mod_base = OTHER; note = 2'-O-methyl nucleotide
  modified_base 38: mod_base = OTHER; note = 2'-O-methyl nucleotide
  modified_base 39: mod_base = OTHER; note = 2'-O-methyl nucleotide
  modified_base 40: mod_base = OTHER; note = 2'-O-methyl nucleotide
  modified_base 88: mod_base = OTHER; note = 2'-O-methyl nucleotide, phosphorothioate linkage
  modified_base 89: mod_base = OTHER; note = 2'-O-methyl nucleotide, phosphorothioate linkage
  modified_base 90: mod_base = OTHER; note = 2'-O-methyl nucleotide, phosphorothioate linkage
  modified_base 91: mod_base = OTHER; note = 2'-O-methyl nucleotide
  source 1..91: mol_type = other RNA

SEQ ID NO: 367-400 - skipped (34 entries)

SEQ ID NO: 401 - RNA, 24 nt, synthetic construct
  misc_feature 1..24: note = Synthetic
  source 1..24: mol_type = other RNA
tcaaagtaccctacaggaggacca

SEQ ID NO: 402 - RNA, 24 nt, synthetic construct
  misc_feature 1..24: note = Synthetic
  source 1..24: mol_type = other RNA
agctgccgttctgcccagtccggg

SEQ ID NO: 403 - RNA, 24 nt, synthetic construct
  misc_feature 1..24: note = Synthetic
  source 1..24: mol_type = other RNA
gctctatccacggcgcccgcggct

SEQ ID NO: 404 - RNA, 24 nt, synthetic construct
  misc_feature 1..24: note = Synthetic
  source 1..24: mol_type = other RNA
cactcacccgcccaggtctgggtc

SEQ ID NO: 405 - RNA, 24 nt, synthetic construct
  misc_feature 1..24: note = Synthetic
  source 1..24: mol_type = other RNA
ctctgggaaaggaggggaagatga

SEQ ID NO: 406 - RNA, 24 nt, synthetic construct
  misc_feature 1..24: note = Synthetic
  source 1..24: mol_type = other RNA
tctgggaaaggaggggaagatgag

SEQ ID NO: 407 - RNA, 24 nt, synthetic construct
  misc_feature 1..24: note = Synthetic
  source 1..24: mol_type = other RNA
tcccagagccgtcttcccagtcca

SEQ ID NO: 408-410 - skipped (3 entries)

SEQ ID NO: 411 - RNA, 20 nt, synthetic construct
  misc_feature 1..20: note = Synthetic
  source 1..20: mol_type = other RNA
cccccggacggttcaagcaa

SEQ ID NO: 412 - RNA, 20 nt, synthetic construct
  misc_feature 1..20: note = Synthetic
  source 1..20: mol_type = other RNA
acagcgacgccgcgagccag

SEQ ID NO: 413 - RNA, 20 nt, synthetic construct
  misc_feature 1..20: note = Synthetic
  source 1..20: mol_type = other RNA
ctctcagctggtacacggca

SEQ ID NO: 414-420 - skipped (7 entries)

SEQ ID NO: 421 - RNA, 101 nt, synthetic construct
  misc_feature 1..101: note = Synthetic
  source 1..101: mol_type = other RNA
tcaaagtaccctacaggaggaccagttgtagctccctgaaaccgttgctacaataaggccgtcgaaagatgtgccgcaacgctctgccttctggcatcgtt

SEQ ID NO: 422 - RNA, 101 nt, synthetic construct
  misc_feature 1..101: note = Synthetic
  source 1..101: mol_type = other RNA
agctgccgttctgcccagtccggggttgtagctccctgaaaccgttgctacaataaggccgtcgaaagatgtgccgcaacgctctgccttctggcatcgtt

SEQ ID NO: 423 - RNA, 101 nt, synthetic construct
  misc_feature 1..101: note = Synthetic
  source 1..101: mol_type = other RNA
gctctatccacggcgcccgcggctgttgtagctccctgaaaccgttgctacaataaggccgtcgaaagatgtgccgcaacgctctgccttctggcatcgtt

SEQ ID NO: 424 - RNA, 101 nt, synthetic construct
  misc_feature 1..101: note = Synthetic
  source 1..101: mol_type = other RNA
cactcacccgcccaggtctgggtcgttgtagctccctgaaaccgttgctacaataaggccgtcgaaagatgtgccgcaacgctctgccttctggcatcgtt

SEQ ID NO: 425 - RNA, 101 nt, synthetic construct
  misc_feature 1..101: note = Synthetic
  source 1..101: mol_type = other RNA
ctctgggaaaggaggggaagatgagttgtagctccctgaaaccgttgctacaataaggccgtcgaaagatgtgccgcaacgctctgccttctggcatcgtt

SEQ ID NO: 426 - RNA, 101 nt, synthetic construct
  misc_feature 1..101: note = Synthetic
  source 1..101: mol_type = other RNA
tctgggaaaggaggggaagatgaggttgtagctccctgaaaccgttgctacaataaggccgtcgaaagatgtgccgcaacgctctgccttctggcatcgtt

SEQ ID NO: 427 - RNA, 101 nt, synthetic construct
  misc_feature 1..101: note = Synthetic
  source 1..101: mol_type = other RNA
tcccagagccgtcttcccagtccagttgtagctccctgaaaccgttgctacaataaggccgtcgaaagatgtgccgcaacgctctgccttctggcatcgtt

SEQ ID NO: 428-430 - skipped (3 entries)

SEQ ID NO: 431 - RNA, 100 nt, synthetic construct
  misc_feature 1..100: note = Synthetic
  source 1..100: mol_type = other RNA
cccccggacggttcaagcaagttttagagctagaaatagcaagttaaaataaggctagtccgttatcaacttgaaaaagtggcaccgagtcggtgctttt

SEQ ID NO: 432 - RNA, 100 nt, synthetic construct
  misc_feature 1..100: note = Synthetic
  source 1..100: mol_type = other RNA
acagcgacgccgcgagccaggttttagagctagaaatagcaagttaaaataaggctagtccgttatcaacttgaaaaagtggcaccgagtcggtgctttt

SEQ ID NO: 433 - RNA, 100 nt, synthetic construct
  misc_feature 1..100: note = Synthetic
  source 1..100: mol_type = other RNA
ctctcagctggtacacggcagttttagagctagaaatagcaagttaaaataaggctagtccgttatcaacttgaaaaagtggcaccgagtcggtgctttt

SEQ ID NO: 434 - RNA, 91 nt, synthetic construct
  misc_feature 1..91: note = Synthetic
  source 1..91: mol_type = other RNA
ctctcagctggtacacggcagttttagagctagaaatagcaagttaaaataaggctagtccgttatcacgaaagggcaccgagtcggtgct

SEQ ID NO: 435-440 - skipped (6 entries)

SEQ ID NO: 441 - RNA, 101 nt, synthetic construct; identical to SEQ ID NO: 421
  misc_feature 1..101: note = Synthetic
  modified_base 1: mod_base = OTHER; note = 2'-O-methyl nucleotide, phosphorothioate linkage
  modified_base 2: mod_base = OTHER; note = 2'-O-methyl nucleotide, phosphorothioate linkage
  modified_base 3: mod_base = OTHER; note = 2'-O-methyl nucleotide, phosphorothioate linkage
  modified_base 4: mod_base = OTHER; note = 2'-O-methyl nucleotide
  modified_base 5: mod_base = OTHER; note = 2'-O-methyl nucleotide
  modified_base 8: mod_base = OTHER; note = 2'-O-methyl nucleotide
  modified_base 9: mod_base = OTHER; note = 2'-O-methyl nucleotide
  modified_base 11: mod_base = OTHER; note = 2'-O-methyl nucleotide
  modified_base 13: mod_base = OTHER; note = 2'-O-methyl nucleotide
  modified_base 18: mod_base = OTHER; note = 2'-O-methyl nucleotide
  modified_base 22: mod_base = OTHER; note = 2'-O-methyl nucleotide
  modified_base 25: mod_base = OTHER; note = 2'-O-methyl nucleotide
  modified_base 29: mod_base = OTHER; note = 2'-O-methyl nucleotide
  modified_base 30: mod_base = OTHER; note = 2'-O-methyl nucleotide
  modified_base 31: mod_base = OTHER; note = 2'-O-methyl nucleotide
  modified_base 32: mod_base = OTHER; note = 2'-O-methyl nucleotide
  modified_base 37: mod_base = OTHER; note = 2'-O-methyl nucleotide
  modified_base 38: mod_base = OTHER; note = 2'-O-methyl nucleotide
  modified_base 39: mod_base = OTHER; note = 2'-O-methyl nucleotide
  modified_base 40: mod_base = OTHER; note = 2'-O-methyl nucleotide
  modified_base 41: mod_base = OTHER; note = 2'-O-methyl nucleotide
  modified_base 42: mod_base = OTHER; note = 2'-O-methyl nucleotide
  modified_base 43: mod_base = OTHER; note = 2'-O-methyl nucleotide
  modified_base 47: mod_base = OTHER; note = 2'-O-methyl nucleotide
  modified_base 48: mod_base = OTHER; note = 2'-O-methyl nucleotide
  modified_base 51: mod_base = OTHER; note = 2'-O-methyl nucleotide
  modified_base 55: mod_base = OTHER; note = phosphorothioate linkage
  modified_base 58: mod_base = OTHER; note = 2'-O-methyl nucleotide
  modified_base 59: mod_base = OTHER; note = 2'-O-methyl nucleotide
  modified_base 61: mod_base = OTHER; note = 2'-O-methyl nucleotide
  modified_base 62: mod_base = OTHER; note = 2'-O-methyl nucleotide
  modified_base 63: mod_base = OTHER; note = 2'-O-methyl nucleotide
  modified_base 64: mod_base = OTHER; note = 2'-O-methyl nucleotide
  modified_base 65: mod_base = OTHER; note = 2'-O-methyl nucleotide
  modified_base 66: mod_base = OTHER; note = 2'-O-methyl nucleotide
  modified_base 67: mod_base = OTHER; note = 2'-O-methyl nucleotide
  modified_base 68: mod_base = OTHER; note = 2'-O-methyl nucleotide
  modified_base 69: mod_base = OTHER; note = 2'-O-methyl nucleotide
  modified_base 70: mod_base = OTHER; note = 2'-O-methyl nucleotide
  modified_base 75: mod_base = OTHER; note = 2'-O-methyl nucleotide
  modified_base 77: mod_base = OTHER; note = 2'-O-methyl nucleotide
  modified_base 80: mod_base = OTHER; note = 2'-O-methyl nucleotide
  modified_base 86: mod_base = OTHER; note = 2'-O-methyl nucleotide
  modified_base 87: mod_base = OTHER; note = 2'-O-methyl nucleotide
  modified_base 89: mod_base = OTHER; note = 2'-O-methyl nucleotide
  modified_base 90: mod_base = OTHER; note = 2'-O-methyl nucleotide
  modified_base 91: mod_base = OTHER; note = 2'-O-methyl nucleotide
  modified_base 92: mod_base = OTHER; note = 2'-O-methyl nucleotide
  modified_base 99: mod_base = OTHER; note = phosphorothioate linkage
  modified_base 100: mod_base = OTHER; note = 2'-O-methyl nucleotide, phosphorothioate linkage
  modified_base 101: mod_base = OTHER; note = 2'-O-methyl nucleotide
  source 1..101: mol_type = other RNA

SEQ ID NO: 442 - RNA, 101 nt, synthetic construct; identical to SEQ ID NO: 421
  misc_feature 1..101: note = Synthetic
  modified_base 1: mod_base = OTHER; note = 2'-O-methyl nucleotide, phosphorothioate linkage
  modified_base 2: mod_base = OTHER; note = 2'-O-methyl nucleotide, phosphorothioate linkage
  modified_base 3: mod_base = OTHER; note = 2'-O-methyl nucleotide, phosphorothioate linkage
  modified_base 4: mod_base = OTHER; note = 2'-O-methyl nucleotide
  modified_base 5: mod_base = OTHER; note = 2'-O-methyl nucleotide
  modified_base 8: mod_base = OTHER; note = 2'-O-methyl nucleotide
  modified_base 9: mod_base = OTHER; note = 2'-O-methyl nucleotide
  modified_base 11: mod_base = OTHER; note = 2'-O-methyl nucleotide
  modified_base 13: mod_base = OTHER; note = 2'-O-methyl nucleotide
  modified_base 18: mod_base = OTHER; note = 2'-O-methyl nucleotide
  modified_base 22: mod_base = OTHER; note = 2'-O-methyl nucleotide
  modified_base 25: mod_base = OTHER; note = 2'-O-methyl nucleotide
  modified_base 29: mod_base = OTHER; note = 2'-O-methyl nucleotide
  modified_base 30: mod_base = OTHER; note = 2'-O-methyl nucleotide
  modified_base 31: mod_base = OTHER; note = 2'-O-methyl nucleotide
  modified_base 32: mod_base = OTHER; note = 2'-O-methyl nucleotide
  modified_base 37: mod_base = OTHER; note = 2'-O-methyl nucleotide
  modified_base 38: mod_base = OTHER; note = 2'-O-methyl nucleotide
  modified_base 39: mod_base = OTHER; note = 2'-O-methyl nucleotide
  modified_base 40: mod_base = OTHER; note = 2'-O-methyl nucleotide
  modified_base 41: mod_base = OTHER; note = 2'-O-methyl nucleotide
  modified_base 42: mod_base = OTHER; note = 2'-O-methyl nucleotide
  modified_base 43: mod_base = OTHER; note = 2'-O-methyl nucleotide
  modified_base 47: mod_base = OTHER; note = 2'-O-methyl nucleotide
  modified_base 48: mod_base = OTHER; note = 2'-O-methyl nucleotide
  modified_base 51: mod_base = OTHER; note = 2'-O-methyl nucleotide
  modified_base 58: mod_base = OTHER; note = 2'-O-methyl nucleotide
  modified_base 59: mod_base = OTHER; note = 2'-O-methyl nucleotide
  modified_base 61: mod_base = OTHER; note = 2'-O-methyl nucleotide
  modified_base 62: mod_base = OTHER; note = 2'-O-methyl nucleotide
  modified_base 63: mod_base = OTHER; note = 2'-O-methyl nucleotide
  modified_base 64: mod_base = OTHER; note = 2'-O-methyl nucleotide
  modified_base 65: mod_base = OTHER; note = 2'-O-methyl nucleotide
  modified_base 66: mod_base = OTHER; note = 2'-O-methyl nucleotide
  modified_base 67: mod_base = OTHER; note = 2'-O-methyl nucleotide
  modified_base 68: mod_base = OTHER; note = 2'-O-methyl nucleotide
  modified_base 69: mod_base = OTHER; note = 2'-O-methyl nucleotide
  modified_base 70: mod_base = OTHER; note = 2'-O-methyl nucleotide
  modified_base 75: mod_base = OTHER; note = 2'-O-methyl nucleotide
  modified_base 77: mod_base = OTHER; note = 2'-O-methyl nucleotide
  modified_base 80: mod_base = OTHER; note = 2'-O-methyl nucleotide
  modified_base 86: mod_base = OTHER; note = 2'-O-methyl nucleotide
  modified_base 87: mod_base = OTHER; note = 2'-O-methyl nucleotide
  modified_base 89: mod_base = OTHER; note = 2'-O-methyl nucleotide
  modified_base 90: mod_base = OTHER; note = 2'-O-methyl nucleotide
  modified_base 91: mod_base = OTHER; note = 2'-O-methyl nucleotide
  modified_base 92: mod_base = OTHER; note = 2'-O-methyl nucleotide
  modified_base 99: mod_base = OTHER; note = phosphorothioate linkage
  modified_base 100: mod_base = OTHER; note = 2'-O-methyl nucleotide, phosphorothioate linkage
  modified_base 101: mod_base = OTHER; note = 2'-O-methyl nucleotide
  source 1..101: mol_type = other RNA

SEQ ID NO: 443 - RNA, 101 nt, synthetic construct; identical to SEQ ID NO: 422
  misc_feature 1..101: note = Synthetic
  modified_base 1: mod_base = OTHER; note = 2'-O-methyl nucleotide, phosphorothioate linkage
  modified_base 2: mod_base = OTHER; note = 2'-O-methyl nucleotide, phosphorothioate linkage
  modified_base 3: mod_base = OTHER; note = 2'-O-methyl nucleotide, phosphorothioate linkage
  modified_base 4: mod_base = OTHER; note = 2'-O-methyl nucleotide
  modified_base 5: mod_base = OTHER; note = 2'-O-methyl nucleotide
  modified_base 8: mod_base = OTHER; note = 2'-O-methyl nucleotide
  modified_base 9: mod_base = OTHER; note = 2'-O-methyl nucleotide
  modified_base 11: mod_base = OTHER; note = 2'-O-methyl nucleotide
  modified_base 13: mod_base = OTHER; note = 2'-O-methyl nucleotide
  modified_base 18: mod_base = OTHER; note = 2'-O-methyl nucleotide
  modified_base 22: mod_base = OTHER; note = 2'-O-methyl nucleotide
  modified_base 25: mod_base = OTHER; note = 2'-O-methyl nucleotide
  modified_base 29: mod_base = OTHER; note = 2'-O-methyl nucleotide
  modified_base 30: mod_base = OTHER; note = 2'-O-methyl nucleotide
  modified_base 31: mod_base = OTHER; note = 2'-O-methyl nucleotide
  modified_base 32: mod_base = OTHER; note = 2'-O-methyl nucleotide
  modified_base 37: mod_base = OTHER; note = 2'-O-methyl nucleotide
  modified_base 38: mod_base = OTHER; note = 2'-O-methyl nucleotide
  modified_base 39: mod_base = OTHER; note = 2'-O-methyl nucleotide
  modified_base 40: mod_base = OTHER; note = 2'-O-methyl nucleotide
  modified_base 41: mod_base = OTHER; note = 2'-O-methyl nucleotide
  modified_base 42: mod_base = OTHER; note = 2'-O-methyl nucleotide
  modified_base 43: mod_base = OTHER; note = 2'-O-methyl nucleotide
  modified_base 47: mod_base = OTHER; note = 2'-O-methyl nucleotide
  modified_base 48: mod_base = OTHER; note = 2'-O-methyl nucleotide
  modified_base 51: mod_base = OTHER; note = 2'-O-methyl nucleotide
  modified_base 55: mod_base = OTHER; note = phosphorothioate linkage
  modified_base 58: mod_base = OTHER; note = 2'-O-methyl nucleotide
  modified_base 59: mod_base = OTHER; note = 2'-O-methyl nucleotide
  modified_base 61: mod_base = OTHER; note = 2'-O-methyl nucleotide
  modified_base 62: mod_base = OTHER; note = 2'-O-methyl nucleotide
  modified_base 63: mod_base = OTHER; note = 2'-O-methyl nucleotide
  modified_base 64: mod_base = OTHER; note = 2'-O-methyl nucleotide
  modified_base 65: mod_base = OTHER; note = 2'-O-methyl nucleotide
  modified_base 66: mod_base = OTHER; note = 2'-O-methyl nucleotide
  modified_base 67: mod_base = OTHER; note = 2'-O-methyl nucleotide
  modified_base 68: mod_base = OTHER; note = 2'-O-methyl nucleotide
  modified_base 69: mod_base = OTHER; note = 2'-O-methyl nucleotide
  modified_base 70: mod_base = OTHER; note = 2'-O-methyl nucleotide
  modified_base 75: mod_base = OTHER; note = 2'-O-methyl nucleotide
  modified_base 77: mod_base = OTHER; note = 2'-O-methyl nucleotide
  modified_base 80: mod_base = OTHER; note = 2'-O-methyl nucleotide
  modified_base 86: mod_base = OTHER; note = 2'-O-methyl nucleotide
  modified_base 87: mod_base = OTHER; note = 2'-O-methyl nucleotide
  modified_base 89: mod_base = OTHER; note = 2'-O-methyl nucleotide
  modified_base 90: mod_base = OTHER; note = 2'-O-methyl nucleotide
  modified_base 91: mod_base = OTHER; note = 2'-O-methyl nucleotide
  modified_base 92: mod_base = OTHER; note = 2'-O-methyl nucleotide
  modified_base 99: mod_base = OTHER; note = phosphorothioate linkage
  modified_base 100: mod_base = OTHER; note = 2'-O-methyl nucleotide, phosphorothioate linkage
  modified_base 101: mod_base = OTHER; note = 2'-O-methyl nucleotide
  source 1..101: mol_type = other RNA

SEQ ID NO: 444 - RNA, 101 nt, synthetic construct; identical to SEQ ID NO: 422
  modified_base 1: mod_base = OTHER; note = Synthetic 220>, 2'-O-methyl nucleotide, phosphorothioate linkage
  modified_base 2: mod_base = OTHER; note = 2'-O-methyl nucleotide, phosphorothioate linkage
  modified_base 3: mod_base = OTHER; note = 2'-O-methyl nucleotide, phosphorothioate linkage
  modified_base 4: mod_base = OTHER; note = 2'-O-methyl nucleotide
  modified_base 5: mod_base = OTHER; note = 2'-O-methyl nucleotide
  modified_base 8: mod_base = OTHER; note = 2'-O-methyl nucleotide
  modified_base 9: mod_base = OTHER; note = 2'-O-methyl nucleotide
  modified_base 11: mod_base = OTHER; note = 2'-O-methyl nucleotide
  modified_base 13: mod_base = OTHER; note = 2'-O-methyl nucleotide
  modified_base 18: mod_base = OTHER; note = 2'-O-methyl nucleotide
  modified_base 22: mod_base = OTHER; note = 2'-O-methyl nucleotide
  modified_base 25: mod_base = OTHER; note = 2'-O-methyl nucleotide
  modified_base 29: mod_base = OTHER; note = 2'-O-methyl nucleotide
  modified_base 30: mod_base = OTHER; note = 2'-O-methyl nucleotide
  modified_base 31: mod_base = OTHER; note = 2'-O-methyl nucleotide
  modified_base 32: mod_base = OTHER; note = 2'-O-methyl nucleotide
  modified_base 37: mod_base = OTHER; note = 2'-O-methyl nucleotide
  modified_base 38: mod_base = OTHER; note = 2'-O-methyl nucleotide
  modified_base 39: mod_base = OTHER; note = 2'-O-methyl nucleotide
  modified_base 40: mod_base = OTHER; note = 2'-O-methyl nucleotide
  modified_base 41: mod_base = OTHER; note = 2'-O-methyl nucleotide
  modified_base 42: mod_base = OTHER; note = 2'-O-methyl nucleotide
  modified_base 43: mod_base = OTHER; note = 2'-O-methyl nucleotide
  modified_base 47: mod_base = OTHER; note = 2'-O-methyl nucleotide
  modified_base 48: mod_base = OTHER; note = 2'-O-methyl nucleotide
  modified_base 51: mod_base = OTHER; note = 2'-O-methyl nucleotide
  modified_base 58: mod_base = OTHER; note = 2'-O-methyl nucleotide
  modified_base 59: mod_base = OTHER; note = 2'-O-methyl nucleotide
  modified_base 61: mod_base = OTHER; note = 2'-O-methyl nucleotide
  modified_base 62: mod_base = OTHER; note = 2'-O-methyl nucleotide
  modified_base 63: mod_base = OTHER; note = 2'-O-methyl nucleotide
  modified_base 64: mod_base = OTHER; note = 2'-O-methyl nucleotide
  modified_base 65: mod_base = OTHER; note = 2'-O-methyl nucleotide
  modified_base 66: mod_base = OTHER; note = 2'-O-methyl nucleotide
  modified_base 67: mod_base = OTHER; note = 2'-O-methyl nucleotide
  modified_base 68: mod_base = OTHER; note = 2'-O-methyl nucleotide
  modified_base 69: mod_base = OTHER; note = 2'-O-methyl nucleotide
  modified_base 70: mod_base = OTHER; note = 2'-O-methyl nucleotide
  modified_base 75: mod_base = OTHER; note = 2'-O-methyl nucleotide
  modified_base 77: mod_base = OTHER; note = 2'-O-methyl nucleotide
  modified_base 80: mod_base = OTHER; note = 2'-O-methyl nucleotide
  modified_base 86: mod_base = OTHER; note = 2'-O-methyl nucleotide
  modified_base 87: mod_base = OTHER; note = 2'-O-methyl nucleotide
  modified_base 89: mod_base = OTHER; note = 2'-O-methyl nucleotide
  modified_base 90: mod_base = OTHER; note = 2'-O-methyl nucleotide
  modified_base 91: mod_base = OTHER; note = 2'-O-methyl nucleotide
  modified_base 92: mod_base = OTHER; note = 2'-O-methyl nucleotide
  modified_base 99: mod_base = OTHER; note = phosphorothioate linkage
  modified_base 100: mod_base = OTHER; note = 2'-O-methyl nucleotide, phosphorothioate linkage
  modified_base 101: mod_base = OTHER; note = 2'-O-methyl nucleotide
  source 1..101: mol_type = other RNA

SEQ ID NO: 445 - RNA, 101 nt, synthetic construct; identical to SEQ ID NO: 423
  modified_base 1: mod_base = OTHER; note = Synthetic 220>, 2'-O-methyl nucleotide, phosphorothioate linkage
  modified_base 2: mod_base = OTHER; note = 2'-O-methyl nucleotide, phosphorothioate linkage
  modified_base 3: mod_base = OTHER; note = 2'-O-methyl nucleotide, phosphorothioate linkage
  modified_base 4: mod_base = OTHER; note = 2'-O-methyl nucleotide
  modified_base 5: mod_base = OTHER; note = 2'-O-methyl nucleotide
  modified_base 8: mod_base = OTHER; note = 2'-O-methyl nucleotide
  modified_base 9: mod_base = OTHER; note = 2'-O-methyl nucleotide
  modified_base 11: mod_base = OTHER; note = 2'-O-methyl nucleotide
  modified_base 13: mod_base = OTHER; note = 2'-O-methyl nucleotide
  modified_base 18: mod_base = OTHER; note = 2'-O-methyl nucleotide
  modified_base 22: mod_base = OTHER; note = 2'-O-methyl nucleotide
  modified_base 25: mod_base = OTHER; note = 2'-O-methyl nucleotide
  modified_base 29: mod_base = OTHER; note = 2'-O-methyl nucleotide
  modified_base 30: mod_base = OTHER; note = 2'-O-methyl nucleotide
  modified_base 31: mod_base = OTHER; note = 2'-O-methyl nucleotide
  modified_base 32: mod_base = OTHER; note = 2'-O-methyl nucleotide
  modified_base 37: mod_base = OTHER; note = 2'-O-methyl nucleotide
  modified_base 38: mod_base = OTHER; note = 2'-O-methyl nucleotide
  modified_base 39: mod_base = OTHER; note = 2'-O-methyl nucleotide
  modified_base 40: mod_base = OTHER; note = 2'-O-methyl nucleotide
  modified_base 41: mod_base = OTHER; note = 2'-O-methyl nucleotide
  modified_base 42: mod_base = OTHER; note = 2'-O-methyl nucleotide
  modified_base 43: mod_base = OTHER; note = 2'-O-methyl nucleotide
  modified_base 47: mod_base = OTHER; note = 2'-O-methyl nucleotide
  modified_base 48: mod_base = OTHER; note = 2'-O-methyl nucleotide
  modified_base 51: mod_base = OTHER; note = 2'-O-methyl nucleotide
  modified_base 58: mod_base = OTHER; note = 2'-O-methyl nucleotide
  modified_base 59: mod_base = OTHER; note = 2'-O-methyl nucleotide
  modified_base 61: mod_base = OTHER; note = 2'-O-methyl nucleotide
  modified_base 62: mod_base = OTHER; note = 2'-O-methyl nucleotide
  modified_base 63: mod_base = OTHER; note = 2'-O-methyl nucleotide
  modified_base 64: mod_base = OTHER; note = 2'-O-methyl nucleotide
  modified_base 65: mod_base = OTHER; note = 2'-O-methyl nucleotide
  modified_base 66: mod_base = OTHER; note = 2'-O-methyl nucleotide
  modified_base 67: mod_base = OTHER; note = 2'-O-methyl nucleotide
  modified_base 68: mod_base = OTHER; note = 2'-O-methyl nucleotide
  modified_base 69: mod_base = OTHER; note = 2'-O-methyl nucleotide
  modified_base 70: mod_base = OTHER; note = 2'-O-methyl nucleotide
  modified_base 75: mod_base = OTHER; note = 2'-O-methyl nucleotide
  modified_base 77: mod_base = OTHER; note = 2'-O-methyl nucleotide
  modified_base 80: mod_base = OTHER; note = 2'-O-methyl nucleotide
  modified_base 86: mod_base = OTHER; note = 2'-O-methyl nucleotide
  modified_base 87: mod_base = OTHER; note = 2'-O-methyl nucleotide
  modified_base 89: mod_base = OTHER; note = 2'-O-methyl nucleotide
  modified_base 90: mod_base = OTHER; note = 2'-O-methyl nucleotide
  modified_base 91: mod_base = OTHER; note = 2'-O-methyl nucleotide
  modified_base 92: mod_base = OTHER; note = 2'-O-methyl nucleotide
  modified_base 99: mod_base = OTHER; note = phosphorothioate linkage
  modified_base 100: mod_base = OTHER; note = 2'-O-methyl nucleotide, phosphorothioate linkage
  modified_base 101: mod_base = OTHER; note = 2'-O-methyl nucleotide
  source 1..101: mol_type = other RNA

SEQ ID NO: 446 - RNA, 101 nt, synthetic construct; identical to SEQ ID NO: 423
  misc_feature 1..101: note = Synthetic
  modified_base 1: mod_base = OTHER; note = 2'-O-methyl nucleotide, phosphorothioate linkage
  modified_base 2: mod_base = OTHER; note = 2'-O-methyl nucleotide, phosphorothioate linkage
  modified_base 3: mod_base = OTHER; note = 2'-O-methyl nucleotide, phosphorothioate linkage
  modified_base 4: mod_base = OTHER; note = 2'-O-methyl nucleotide
  modified_base 5: mod_base = OTHER; note = 2'-O-methyl nucleotide
  modified_base 8: mod_base = OTHER; note = 2'-O-methyl nucleotide
  modified_base 9: mod_base = OTHER; note = 2'-O-methyl nucleotide
  modified_base 11: mod_base = OTHER; note = 2'-O-methyl nucleotide
  modified_base 13: mod_base = OTHER; note = 2'-O-methyl nucleotide
  modified_base 18: mod_base = OTHER; note = 2'-O-methyl nucleotide
  modified_base 22: mod_base = OTHER; note = 2'-O-methyl nucleotide
  modified_base 25: mod_base = OTHER; note = 2'-O-methyl nucleotide
  modified_base 29: mod_base = OTHER; note = 2'-O-methyl nucleotide
  modified_base 30: mod_base = OTHER; note = 2'-O-methyl nucleotide
  modified_base 31: mod_base = OTHER; note = 2'-O-methyl nucleotide
  modified_base 32: mod_base = OTHER; note = 2'-O-methyl nucleotide
  modified_base 37: mod_base = OTHER; note = 2'-O-methyl nucleotide
  modified_base 38: mod_base = OTHER; note = 2'-O-methyl nucleotide
  modified_base 39: mod_base = OTHER; note = 2'-O-methyl nucleotide
  modified_base 40: mod_base = OTHER; note = 2'-O-methyl nucleotide
  modified_base 41: mod_base = OTHER; note = 2'-O-methyl nucleotide
  modified_base 42: mod_base = OTHER; note = 2'-O-methyl nucleotide
  modified_base 43: mod_base = OTHER; note = 2'-O-methyl nucleotide
  modified_base 47: mod_base = OTHER; note = 2'-O-methyl nucleotide
  modified_base 48: mod_base = OTHER; note = 2'-O-methyl nucleotide
  modified_base 51: mod_base = OTHER; note = 2'-O-methyl nucleotide
  modified_base 58: mod_base = OTHER; note = 2'-O-methyl nucleotide
  modified_base 59: mod_base = OTHER; note = 2'-O-methyl nucleotide
  modified_base 61: mod_base = OTHER; note = 2'-O-methyl nucleotide
  modified_base 62: mod_base = OTHER; note = 2'-O-methyl nucleotide
  modified_base 63: mod_base = OTHER; note = 2'-O-methyl nucleotide
  modified_base 64: mod_base = OTHER; note = 2'-O-methyl nucleotide
  modified_base 65: mod_base = OTHER; note = 2'-O-methyl nucleotide
  modified_base 66: mod_base = OTHER; note = 2'-O-methyl nucleotide
  modified_base 67: mod_base = OTHER; note = 2'-O-methyl nucleotide
  modified_base 68: mod_base = OTHER; note = 2'-O-methyl nucleotide
  modified_base 69: mod_base = OTHER; note = 2'-O-methyl nucleotide
  modified_base 70: mod_base = OTHER; note = 2'-O-methyl nucleotide
  modified_base 75: mod_base = OTHER; note = 2'-O-methyl nucleotide
  modified_base 77: mod_base = OTHER; note = 2'-O-methyl nucleotide
  modified_base 80: mod_base = OTHER; note = 2'-O-methyl nucleotide
  modified_base 86: mod_base = OTHER; note = 2'-O-methyl nucleotide
  modified_base 87: mod_base = OTHER; note = 2'-O-methyl nucleotide
  modified_base 89: mod_base = OTHER; note = 2'-O-methyl nucleotide
  modified_base 90: mod_base = OTHER; note = 2'-O-methyl nucleotide
  modified_base 91: mod_base = OTHER; note = 2'-O-methyl nucleotide
  modified_base 92: mod_base = OTHER; note = 2'-O-methyl nucleotide
  modified_base 99: mod_base = OTHER; note = phosphorothioate linkage
  modified_base 100: mod_base = OTHER; note = 2'-O-methyl nucleotide, phosphorothioate linkage
  modified_base 101: mod_base = OTHER; note = 2'-O-methyl nucleotide
  source 1..101: mol_type = other RNA

SEQ ID NO: 447 - RNA, 101 nt, synthetic construct; identical to SEQ ID NO: 424
  misc_feature 1..101: note = Synthetic
  modified_base 1: mod_base = OTHER; note = 2'-O-methyl nucleotide, phosphorothioate linkage
  modified_base 2: mod_base = OTHER; note = 2'-O-methyl nucleotide, phosphorothioate linkage
  modified_base 3: mod_base = OTHER; note = 2'-O-methyl nucleotide, phosphorothioate linkage
  modified_base 4: mod_base = OTHER; note = 2'-O-methyl nucleotide
  modified_base 5: mod_base = OTHER; note = 2'-O-methyl nucleotide
  modified_base 8: mod_base = OTHER; note = 2'-O-methyl nucleotide
  modified_base 9: mod_base = OTHER; note = 2'-O-methyl nucleotide
  modified_base 11: mod_base = OTHER; note = 2'-O-methyl nucleotide
  modified_base 13: mod_base = OTHER; note = 2'-O-methyl nucleotide
  modified_base 18: mod_base = OTHER; note = 2'-O-methyl nucleotide
  modified_base 22: mod_base = OTHER; note = 2'-O-methyl nucleotide
  modified_base 25: mod_base = OTHER; note = 2'-O-methyl nucleotide
  modified_base 29: mod_base = OTHER; note = 2'-O-methyl nucleotide
  modified_base 30: mod_base = OTHER; note = 2'-O-methyl nucleotide
  modified_base 31: mod_base = OTHER; note = 2'-O-methyl nucleotide
  modified_base 32: mod_base = OTHER; note = 2'-O-methyl nucleotide
  modified_base 37: mod_base = OTHER; note = 2'-O-methyl nucleotide
  modified_base 38: mod_base = OTHER; note = 2'-O-methyl nucleotide
  modified_base 39: mod_base = OTHER; note = 2'-O-methyl nucleotide
  modified_base 40: mod_base = OTHER; note = 2'-O-methyl nucleotide
  modified_base 41: mod_base = OTHER; note = 2'-O-methyl nucleotide
  modified_base 42: mod_base = OTHER; note = 2'-O-methyl nucleotide
  modified_base 43: mod_base = OTHER; note = 2'-O-methyl nucleotide
  modified_base 47: mod_base = OTHER; note = 2'-O-methyl nucleotide
  modified_base 48: mod_base = OTHER; note = 2'-O-methyl nucleotide
  modified_base 51: mod_base = OTHER; note = 2'-O-methyl nucleotide
  modified_base 55: mod_base = OTHER; note = phosphorothioate linkage
  modified_base 58: mod_base = OTHER; note = 2'-O-methyl nucleotide
  modified_base 59: mod_base = OTHER; note = 2'-O-methyl nucleotide
  modified_base 61: mod_base = OTHER; note = 2'-O-methyl nucleotide
  modified_base 62: mod_base = OTHER; note = 2'-O-methyl nucleotide
  modified_base 63: mod_base = OTHER; note = 2'-O-methyl nucleotide
  modified_base 64: mod_base = OTHER; note = 2'-O-methyl nucleotide
  modified_base 65: mod_base = OTHER; note = 2'-O-methyl nucleotide
  modified_base 66: mod_base = OTHER; note = 2'-O-methyl nucleotide
  modified_base 67: mod_base = OTHER; note = 2'-O-methyl nucleotide
  modified_base 68: mod_base = OTHER; note = 2'-O-methyl nucleotide
  modified_base 69: mod_base = OTHER; note = 2'-O-methyl nucleotide
  modified_base 70: mod_base = OTHER; note = 2'-O-methyl nucleotide
  modified_base 75: mod_base = OTHER; note = 2'-O-methyl nucleotide
  modified_base 77: mod_base = OTHER; note = 2'-O-methyl nucleotide
  modified_base 80: mod_base = OTHER; note = 2'-O-methyl nucleotide
  modified_base 86: mod_base = OTHER; note = 2'-O-methyl nucleotide
  modified_base 87: mod_base = OTHER; note = 2'-O-methyl nucleotide
  modified_base 89: mod_base = OTHER; note = 2'-O-methyl nucleotide
  modified_base 90: mod_base = OTHER; note = 2'-O-methyl nucleotide
  modified_base 91: mod_base = OTHER; note = 2'-O-methyl nucleotide
  modified_base 92: mod_base = OTHER; note = 2'-O-methyl nucleotide
  modified_base 99: mod_base = OTHER; note = phosphorothioate linkage
  modified_base 100: mod_base = OTHER; note = 2'-O-methyl nucleotide, phosphorothioate linkage
  modified_base 101: mod_base = OTHER; note = 2'-O-methyl nucleotide
  source 1..101: mol_type = other RNA

SEQ ID NO: 448 - RNA, 101 nt, synthetic construct; identical to SEQ ID NO: 424
  misc_feature 1..101: note = Synthetic
  modified_base 1: mod_base = OTHER; note = 2'-O-methyl nucleotide, phosphorothioate linkage
  modified_base 2: mod_base = OTHER; note = 2'-O-methyl nucleotide, phosphorothioate linkage
  modified_base 3: mod_base = OTHER; note = 2'-O-methyl nucleotide, phosphorothioate linkage
  modified_base 4: mod_base = OTHER; note = 2'-O-methyl nucleotide
  modified_base 5: mod_base = OTHER; note = 2'-O-methyl nucleotide
  modified_base 8: mod_base = OTHER; note = 2'-O-methyl nucleotide
  modified_base 9: mod_base = OTHER; note = 2'-O-methyl nucleotide
  modified_base 11: mod_base = OTHER; note = 2'-O-methyl nucleotide
  modified_base 13: mod_base = OTHER; note = 2'-O-methyl nucleotide
  modified_base 18: mod_base = OTHER; note = 2'-O-methyl nucleotide
  modified_base 22: mod_base = OTHER; note = 2'-O-methyl nucleotide
  modified_base 25: mod_base = OTHER; note = 2'-O-methyl nucleotide
  modified_base 29: mod_base = OTHER; note = 2'-O-methyl nucleotide
  modified_base 30: mod_base = OTHER; note = 2'-O-methyl nucleotide
  modified_base 31: mod_base = OTHER; note = 2'-O-methyl nucleotide
  modified_base 32: mod_base = OTHER; note = 2'-O-methyl nucleotide
  modified_base 37: mod_base = OTHER; note = 2'-O-methyl nucleotide
  modified_base 38: mod_base = OTHER; note = 2'-O-methyl nucleotide
  modified_base 39: mod_base = OTHER; note = 2'-O-methyl nucleotide
  modified_base 40: mod_base = OTHER; note = 2'-O-methyl nucleotide
  modified_base 41: mod_base = OTHER; note = 2'-O-methyl nucleotide
  modified_base 42: mod_base = OTHER; note = 2'-O-methyl nucleotide
  modified_base 43: mod_base = OTHER; note = 2'-O-methyl nucleotide
  modified_base 47: mod_base = OTHER; note = 2'-O-methyl nucleotide
  modified_base 48: mod_base = OTHER; note = 2'-O-methyl nucleotide
  modified_base 51: mod_base = OTHER; note = 2'-O-methyl nucleotide
  modified_base 58: mod_base = OTHER; note = 2'-O-methyl nucleotide
  modified_base 59: mod_base = OTHER; note = 2'-O-methyl nucleotide
  modified_base 61: mod_base = OTHER; note = 2'-O-methyl nucleotide
  modified_base 62: mod_base = OTHER; note = 2'-O-methyl nucleotide
  modified_base 63: mod_base = OTHER; note = 2'-O-methyl nucleotide
  modified_base 64: mod_base = OTHER; note = 2'-O-methyl nucleotide
  modified_base 65: mod_base = OTHER; note = 2'-O-methyl nucleotide
  modified_base 66: mod_base = OTHER; note = 2'-O-methyl nucleotide
  modified_base 67: mod_base = OTHER; note = 2'-O-methyl nucleotide
  modified_base 68: mod_base = OTHER; note = 2'-O-methyl nucleotide
  modified_base 69: mod_base = OTHER; note = 2'-O-methyl nucleotide
  modified_base 70: mod_base = OTHER; note = 2'-O-methyl nucleotide
  modified_base 75: mod_base = OTHER; note = 2'-O-methyl nucleotide
  modified_base 77: mod_base = OTHER; note = 2'-O-methyl nucleotide
  modified_base 80: mod_base = OTHER; note = 2'-O-methyl nucleotide
  modified_base 86: mod_base = OTHER; note = 2'-O-methyl nucleotide
  modified_base 87: mod_base = OTHER; note = 2'-O-methyl nucleotide
  modified_base 89: mod_base = OTHER; note = 2'-O-methyl nucleotide
  modified_base 90: mod_base = OTHER; note = 2'-O-methyl nucleotide
  modified_base 91: mod_base = OTHER; note = 2'-O-methyl nucleotide
  modified_base 92: mod_base = OTHER; note = 2'-O-methyl nucleotide
  modified_base 99: mod_base = OTHER; note = phosphorothioate linkage
  modified_base 100: mod_base = OTHER; note = 2'-O-methyl nucleotide, phosphorothioate linkage
  modified_base 101: mod_base = OTHER; note = 2'-O-methyl nucleotide
  source 1..101: mol_type = other RNA

SEQ ID NO: 449 - RNA, 101 nt, synthetic construct; identical to SEQ ID NO: 425
  misc_feature 1..101: note = Synthetic
  modified_base 1: mod_base = OTHER; note = 2'-O-methyl nucleotide, phosphorothioate linkage
  modified_base 2: mod_base = OTHER; note = 2'-O-methyl nucleotide, phosphorothioate linkage
  modified_base 3: mod_base = OTHER; note = 2'-O-methyl nucleotide, phosphorothioate linkage
  modified_base 4: mod_base = OTHER; note = 2'-O-methyl nucleotide
  modified_base 5: mod_base = OTHER; note = 2'-O-methyl nucleotide
  modified_base 8: mod_base = OTHER; note = 2'-O-methyl nucleotide
  modified_base 9: mod_base = OTHER; note = 2'-O-methyl nucleotide
  modified_base 11: mod_base = OTHER; note = 2'-O-methyl nucleotide
  modified_base 13: mod_base = OTHER; note = 2'-O-methyl nucleotide
  modified_base 18: mod_base = OTHER; note = 2'-O-methyl nucleotide
  modified_base 22: mod_base = OTHER; note = 2'-O-methyl nucleotide
  modified_base 25: mod_base = OTHER; note = 2'-O-methyl nucleotide
  modified_base 29: mod_base = OTHER; note = 2'-O-methyl nucleotide
  modified_base 30: mod_base = OTHER; note = 2'-O-methyl nucleotide
  modified_base 31: mod_base = OTHER; note = 2'-O-methyl nucleotide
  modified_base 32: mod_base = OTHER; note = 2'-O-methyl nucleotide
  modified_base 37: mod_base = OTHER; note = 2'-O-methyl nucleotide
  modified_base 38: mod_base = OTHER; note = 2'-O-methyl nucleotide
  modified_base 39: mod_base = OTHER; note = 2'-O-methyl nucleotide
  modified_base 40: mod_base = OTHER; note = 2'-O-methyl nucleotide
  modified_base 41: mod_base = OTHER; note = 2'-O-methyl nucleotide
  modified_base 42: mod_base = OTHER; note = 2'-O-methyl nucleotide
  modified_base 43: mod_base = OTHER; note = 2'-O-methyl nucleotide
  modified_base 47: mod_base = OTHER; note = 2'-O-methyl nucleotide
  modified_base 48: mod_base = OTHER; note = 2'-O-methyl nucleotide
  modified_base 51: mod_base = OTHER; note = 2'-O-methyl nucleotide
  modified_base 55: mod_base = OTHER; note = phosphorothioate linkage
  modified_base 58: mod_base = OTHER; note = 2'-O-methyl nucleotide
  modified_base 59: mod_base = OTHER; note = 2'-O-methyl nucleotide
  modified_base 61: mod_base = OTHER; note = 2'-O-methyl nucleotide
  modified_base 62: mod_base = OTHER; note = 2'-O-methyl nucleotide
  modified_base 63: mod_base = OTHER; note = 2'-O-methyl nucleotide
  modified_base 64: mod_base = OTHER; note = 2'-O-methyl nucleotide
  modified_base 65: mod_base = OTHER; note = 2'-O-methyl nucleotide
  modified_base 66: mod_base = OTHER; note = 2'-O-methyl nucleotide
  modified_base 67: mod_base = OTHER; note = 2'-O-methyl nucleotide
  modified_base 68: mod_base = OTHER; note = 2'-O-methyl nucleotide
  modified_base 69: mod_base = OTHER; note = 2'-O-methyl nucleotide
  modified_base 70: mod_base = OTHER; note = 2'-O-methyl nucleotide
  modified_base 75: mod_base = OTHER; note = 2'-O-methyl nucleotide
  modified_base 77: mod_base = OTHER; note = 2'-O-methyl nucleotide
  modified_base 80: mod_base = OTHER; note = 2'-O-methyl nucleotide
  modified_base 86: mod_base = OTHER; note = 2'-O-methyl nucleotide
  modified_base 87: mod_base = OTHER; note = 2'-O-methyl nucleotide
  modified_base 89: mod_base = OTHER; note = 2'-O-methyl nucleotide
  modified_base 90: mod_base = OTHER; note = 2'-O-methyl nucleotide
  modified_base 91: mod_base = OTHER; note = 2'-O-methyl nucleotide
  modified_base 92: mod_base = OTHER; note = 2'-O-methyl nucleotide
  modified_base 99: mod_base = OTHER; note = phosphorothioate linkage
  modified_base 100: mod_base = OTHER; note = 2'-O-methyl nucleotide, phosphorothioate linkage
  modified_base 101: mod_base = OTHER; note = 2'-O-methyl nucleotide
  source 1..101: mol_type = other RNA

SEQ ID NO: 450 - RNA, 101 nt, synthetic construct; identical to SEQ ID NO: 425
  misc_feature 1..101: note = Synthetic
  modified_base 1: mod_base = OTHER; note = 2'-O-methyl nucleotide, phosphorothioate linkage
  modified_base 2: mod_base = OTHER; note = 2'-O-methyl nucleotide, phosphorothioate linkage
  modified_base 3: mod_base = OTHER; note = 2'-O-methyl nucleotide, phosphorothioate linkage
  modified_base 4: mod_base = OTHER; note = 2'-O-methyl nucleotide
  modified_base 5: mod_base = OTHER; note = 2'-O-methyl nucleotide
  modified_base 8: mod_base = OTHER; note = 2'-O-methyl nucleotide
  modified_base 9: mod_base = OTHER; note = 2'-O-methyl nucleotide
  modified_base 11: mod_base = OTHER; note = 2'-O-methyl nucleotide
  modified_base 13: mod_base = OTHER; note = 2'-O-methyl nucleotide
  modified_base 18: mod_base = OTHER; note = 2'-O-methyl nucleotide
  modified_base 22: mod_base = OTHER; note = 2'-O-methyl nucleotide
  modified_base 25: mod_base = OTHER; note = 2'-O-methyl nucleotide
  modified_base 29: mod_base = OTHER; note = 2'-O-methyl nucleotide
  modified_base 30: mod_base = OTHER; note = 2'-O-methyl nucleotide
  modified_base 31: mod_base = OTHER; note = 2'-O-methyl nucleotide
  modified_base 32: mod_base = OTHER; note = 2'-O-methyl nucleotide
  modified_base 37: mod_base = OTHER; note = 2'-O-methyl nucleotide
  modified_base 38: mod_base = OTHER; note = 2'-O-methyl nucleotide
  modified_base 39: mod_base = OTHER; note = 2'-O-methyl nucleotide
  modified_base 40: mod_base = OTHER; note = 2'-O-methyl nucleotide
  modified_base 41: mod_base = OTHER; note = 2'-O-methyl nucleotide
  modified_base 42: mod_base = OTHER; note = 2'-O-methyl nucleotide
  modified_base 43: mod_base = OTHER; note = 2'-O-methyl nucleotide
  modified_base 47: mod_base = OTHER; note = 2'-O-methyl nucleotide
  modified_base 48: mod_base = OTHER; note = 2'-O-methyl nucleotide
  modified_base 51: mod_base = OTHER; note = 2'-O-methyl nucleotide
  modified_base 58: mod_base = OTHER; note = 2'-O-methyl nucleotide
  modified_base 59: mod_base = OTHER; note = 2'-O-methyl nucleotide
  modified_base 61: mod_base = OTHER; note = 2'-O-methyl nucleotide
  modified_base 62: mod_base = OTHER; note = 2'-O-methyl nucleotide
  modified_base 63: mod_base = OTHER; note = 2'-O-methyl nucleotide
  modified_base 64: mod_base = OTHER; note = 2'-O-methyl nucleotide
  modified_base 65: mod_base = OTHER; note = 2'-O-methyl nucleotide
  modified_base 66: mod_base = OTHER; note = 2'-O-methyl nucleotide
  modified_base 67: mod_base = OTHER; note = 2'-O-methyl nucleotide
  modified_base 68: mod_base = OTHER; note = 2'-O-methyl nucleotide
  modified_base 69: mod_base = OTHER; note = 2'-O-methyl nucleotide
  modified_base 70: mod_base = OTHER; note = 2'-O-methyl nucleotide
  modified_base 75: mod_base = OTHER; note = 2'-O-methyl nucleotide
  modified_base 77: mod_base = OTHER; note = 2'-O-methyl nucleotide
  modified_base 80: mod_base = OTHER; note = 2'-O-methyl nucleotide
  modified_base 86: mod_base = OTHER; note = 2'-O-methyl nucleotide
  modified_base 87: mod_base = OTHER; note = 2'-O-methyl nucleotide
  modified_base 89: mod_base = OTHER; note = 2'-O-methyl nucleotide
  modified_base 90: mod_base = OTHER; note = 2'-O-methyl nucleotide
  modified_base 91: mod_base = OTHER; note = 2'-O-methyl nucleotide
  modified_base 92: mod_base = OTHER; note = 2'-O-methyl nucleotide
  modified_base 99: mod_base = OTHER; note = phosphorothioate linkage
  modified_base 100: mod_base = OTHER; note = 2'-O-methyl nucleotide, phosphorothioate linkage
  modified_base 101: mod_base = OTHER; note = 2'-O-methyl nucleotide
  source 1..101: mol_type = other RNA

SEQ ID NO: 451 - RNA, 101 nt, synthetic construct; identical to SEQ ID NO: 426
  misc_feature 1..101: note = Synthetic
  modified_base 1: mod_base = OTHER; note = 2'-O-methyl nucleotide, phosphorothioate linkage
  modified_base 2: mod_base = OTHER; note = 2'-O-methyl nucleotide, phosphorothioate linkage
  modified_base 3: mod_base = OTHER; note = 2'-O-methyl nucleotide, phosphorothioate linkage
  modified_base 4: mod_base = OTHER; note = 2'-O-methyl nucleotide
  modified_base 5: mod_base = OTHER; note = 2'-O-methyl nucleotide
  modified_base 8: mod_base = OTHER; note = 2'-O-methyl nucleotide
  modified_base 9: mod_base = OTHER; note = 2'-O-methyl nucleotide
  modified_base 11: mod_base = OTHER; note = 2'-O-methyl nucleotide
  modified_base 13: mod_base = OTHER; note = 2'-O-methyl nucleotide
  modified_base 18: mod_base = OTHER; note = 2'-O-methyl nucleotide
  modified_base 22: mod_base = OTHER; note = 2'-O-methyl nucleotide
  modified_base 25: mod_base = OTHER; note = 2'-O-methyl nucleotide
  modified_base 29: mod_base = OTHER; note = 2'-O-methyl nucleotide
  modified_base 30: mod_base = OTHER; note = 2'-O-methyl nucleotide
  modified_base 31: mod_base = OTHER; note = 2'-O-methyl nucleotide
  modified_base 32: mod_base = OTHER; note = 2'-O-methyl nucleotide
  modified_base 37: mod_base = OTHER; note = 2'-O-methyl nucleotide
  modified_base 38: mod_base = OTHER; note = 2'-O-methyl nucleotide
  modified_base 39: mod_base = OTHER; note = 2'-O-methyl nucleotide
  modified_base 40: mod_base = OTHER; note = 2'-O-methyl nucleotide
  modified_base 41: mod_base = OTHER; note = 2'-O-methyl nucleotide
  modified_base 42: mod_base = OTHER; note = 2'-O-methyl nucleotide
  modified_base 43: mod_base = OTHER; note = 2'-O-methyl nucleotide
  modified_base 47: mod_base = OTHER; note = 2'-O-methyl nucleotide
  modified_base 48: mod_base = OTHER; note = 2'-O-methyl nucleotide
  modified_base 51: mod_base = OTHER; note = 2'-O-methyl nucleotide
  modified_base 55: mod_base = OTHER; note = phosphorothioate linkage
  modified_base 58: mod_base = OTHER; note = 2'-O-methyl nucleotide
  modified_base 59: mod_base = OTHER; note = 2'-O-methyl nucleotide
  modified_base 61: mod_base = OTHER; note = 2'-O-methyl nucleotide
  modified_base 62: mod_base = OTHER; note = 2'-O-methyl nucleotide
  modified_base 63: mod_base = OTHER; note = 2'-O-methyl nucleotide
  modified_base 64: mod_base = OTHER; note = 2'-O-methyl nucleotide
  modified_base 65: mod_base = OTHER; note = 2'-O-methyl nucleotide
  modified_base 66: mod_base = OTHER; note = 2'-O-methyl nucleotide
  modified_base 67: mod_base = OTHER; note = 2'-O-methyl nucleotide
  modified_base 68: mod_base = OTHER; note = 2'-O-methyl nucleotide
  modified_base 69: mod_base = OTHER; note = 2'-O-methyl nucleotide
  modified_base 70: mod_base = OTHER; note = 2'-O-methyl nucleotide
  modified_base 75: mod_base = OTHER; note = 2'-O-methyl nucleotide
  modified_base 77: mod_base = OTHER; note = 2'-O-methyl nucleotide
  modified_base 80: mod_base = OTHER; note = 2'-O-methyl nucleotide
  modified_base 86: mod_base = OTHER; note = 2'-O-methyl nucleotide
  modified_base 87: mod_base = OTHER; note = 2'-O-methyl nucleotide
  modified_base 89: mod_base = OTHER; note = 2'-O-methyl nucleotide
  modified_base 90: mod_base = OTHER; note = 2'-O-methyl nucleotide
  modified_base 91: mod_base = OTHER; note = 2'-O-methyl nucleotide
  modified_base 92: mod_base = OTHER; note = 2'-O-methyl nucleotide
  modified_base 99: mod_base = OTHER; note = phosphorothioate linkage
  modified_base 100: mod_base = OTHER; note = 2'-O-methyl nucleotide, phosphorothioate linkage
  modified_base 101: mod_base = OTHER; note = 2'-O-methyl nucleotide
  source 1..101: mol_type = other RNA

SEQ ID NO: 452 - RNA, 101 nt, synthetic construct; identical to SEQ ID NO: 426
  misc_feature 1..101: note = Synthetic
  source 1..101: mol_type = other RNA

SEQ ID NO: 453 - RNA, 101 nt, synthetic construct; identical to SEQ ID NO: 427
  misc_feature 1..101: note = Synthetic
  modified_base 1: mod_base = OTHER; note = 2'-O-methyl nucleotide, phosphorothioate linkage
  modified_base 2: mod_base = OTHER; note = 2'-O-methyl nucleotide, phosphorothioate linkage
  modified_base 3: mod_base = OTHER; note = 2'-O-methyl nucleotide, phosphorothioate linkage
  modified_base 4: mod_base = OTHER; note = 2'-O-methyl nucleotide
  modified_base 5: mod_base = OTHER; note = 2'-O-methyl nucleotide
  modified_base 8: mod_base = OTHER; note = 2'-O-methyl nucleotide
  modified_base 9: mod_base = OTHER; note = 2'-O-methyl nucleotide
  modified_base 11: mod_base = OTHER; note = 2'-O-methyl nucleotide
  modified_base 13: mod_base = OTHER; note = 2'-O-methyl nucleotide
  modified_base 18: mod_base = OTHER; note = 2'-O-methyl nucleotide
  modified_base 22: mod_base = OTHER; note = 2'-O-methyl nucleotide
  modified_base 25: mod_base = OTHER; note = 2'-O-methyl nucleotide
  modified_base 29: mod_base = OTHER; note = 2'-O-methyl nucleotide
  modified_base 30: mod_base = OTHER; note = 2'-O-methyl nucleotide
  modified_base 31: mod_base = OTHER; note = 2'-O-methyl nucleotide
  modified_base 32: mod_base = OTHER; note = 2'-O-methyl nucleotide
  modified_base 37: mod_base = OTHER; note = 2'-O-methyl nucleotide
  modified_base 38: mod_base = OTHER; note = 2'-O-methyl nucleotide
  modified_base 39: mod_base = OTHER; note = 2'-O-methyl nucleotide
  modified_base 40: mod_base = OTHER; note = 2'-O-methyl nucleotide
  modified_base 41: mod_base = OTHER; note = 2'-O-methyl nucleotide
  modified_base 42: mod_base = OTHER; note = 2'-O-methyl nucleotide
  modified_base 43: mod_base = OTHER; note = 2'-O-methyl nucleotide
  modified_base 47: mod_base = OTHER; note = 2'-O-methyl nucleotide
  modified_base 48: mod_base = OTHER; note = 2'-O-methyl nucleotide
  modified_base 51: mod_base = OTHER; note = 2'-O-methyl nucleotide
  modified_base 55: mod_base = OTHER; note = phosphorothioate linkage
  modified_base 58: mod_base = OTHER; note = 2'-O-methyl nucleotide
  modified_base 59: mod_base = OTHER; note = 2'-O-methyl nucleotide
  modified_base 61: mod_base = OTHER; note = 2'-O-methyl nucleotide
  modified_base 62: mod_base = OTHER; note = 2'-O-methyl nucleotide
  modified_base 63: mod_base = OTHER; note = 2'-O-methyl nucleotide
  modified_base 64: mod_base = OTHER; note = 2'-O-methyl nucleotide
  modified_base 65: mod_base = OTHER; note = 2'-O-methyl nucleotide
  modified_base 66: mod_base = OTHER; note = 2'-O-methyl nucleotide
  modified_base 67: mod_base = OTHER; note = 2'-O-methyl nucleotide
  modified_base 68: mod_base = OTHER; note = 2'-O-methyl nucleotide
  modified_base 69: mod_base = OTHER; note = 2'-O-methyl nucleotide
  modified_base 70: mod_base = OTHER; note = 2'-O-methyl nucleotide
  modified_base 75: mod_base = OTHER; note = 2'-O-methyl nucleotide
  modified_base 77: mod_base = OTHER; note = 2'-O-methyl nucleotide
  modified_base 80: mod_base = OTHER; note = 2'-O-methyl nucleotide
  modified_base 86: mod_base = OTHER; note = 2'-O-methyl nucleotide
  modified_base 87: mod_base = OTHER; note = 2'-O-methyl nucleotide
  modified_base 89: mod_base = OTHER; note = 2'-O-methyl nucleotide
  modified_base 90: mod_base = OTHER; note = 2'-O-methyl nucleotide
  modified_base 91: mod_base = OTHER; note = 2'-O-methyl nucleotide
  modified_base 92: mod_base = OTHER; note = 2'-O-methyl nucleotide
  modified_base 99: mod_base = OTHER; note = phosphorothioate linkage
  modified_base 100: mod_base = OTHER; note = 2'-O-methyl nucleotide, phosphorothioate linkage
  modified_base 101: mod_base = OTHER; note = 2'-O-methyl nucleotide
  source 1..101: mol_type = other RNA

SEQ ID NO: 454 - RNA, 101 nt, synthetic construct; identical to SEQ ID NO: 427
  misc_feature 1..101: note = Synthetic
  modified_base 1: mod_base = OTHER; note = 2'-O-methyl nucleotide, phosphorothioate linkage
  modified_base 2: mod_base = OTHER; note = 2'-O-methyl nucleotide, phosphorothioate linkage
  modified_base 3: mod_base = OTHER; note = 2'-O-methyl nucleotide, phosphorothioate linkage
  modified_base 4: mod_base = OTHER; note = 2'-O-methyl nucleotide
  modified_base 5: mod_base = OTHER; note = 2'-O-methyl nucleotide
  modified_base 8: mod_base = OTHER; note = 2'-O-methyl nucleotide
  modified_base 9: mod_base = OTHER; note = 2'-O-methyl nucleotide
  modified_base 11: mod_base = OTHER; note = 2'-O-methyl nucleotide
  modified_base 13: mod_base = OTHER; note = 2'-O-methyl nucleotide
  modified_base 18: mod_base = OTHER; note = 2'-O-methyl nucleotide
  modified_base 22: mod_base = OTHER; note = 2'-O-methyl nucleotide
  modified_base 25: mod_base = OTHER; note = 2'-O-methyl nucleotide
  modified_base 29: mod_base = OTHER; note = 2'-O-methyl nucleotide
  modified_base 30: mod_base = OTHER; note = 2'-O-methyl nucleotide
  modified_base 31: mod_base = OTHER; note = 2'-O-methyl nucleotide
  modified_base 32: mod_base = OTHER; note = 2'-O-methyl nucleotide
  modified_base 37: mod_base = OTHER; note = 2'-O-methyl nucleotide
  modified_base 38: mod_base = OTHER; note = 2'-O-methyl nucleotide
  modified_base 39: mod_base = OTHER; note = 2'-O-methyl nucleotide
  modified_base 40: mod_base = OTHER; note = 2'-O-methyl nucleotide
  modified_base 41: mod_base = OTHER; note = 2'-O-methyl nucleotide
  modified_base 42: mod_base = OTHER; note = 2'-O-methyl nucleotide
  modified_base 43: mod_base = OTHER; note = 2'-O-methyl nucleotide
  modified_base 47: mod_base = OTHER; note = 2'-O-methyl nucleotide
  modified_base 48: mod_base = OTHER; note = 2'-O-methyl nucleotide
  modified_base 51: mod_base = OTHER; note = 2'-O-methyl nucleotide
  modified_base 58: mod_base = OTHER; note = 2'-O-methyl nucleotide
  modified_base 59: mod_base = OTHER; note = 2'-O-methyl nucleotide
  modified_base 61: mod_base = OTHER; note = 2'-O-methyl nucleotide
  modified_base 62: mod_base = OTHER; note = 2'-O-methyl nucleotide
  modified_base 63: mod_base = OTHER; note = 2'-O-methyl nucleotide
  modified_base 64: mod_base = OTHER; note = 2'-O-methyl nucleotide
  modified_base 65: mod_base = OTHER; note = 2'-O-methyl nucleotide
  modified_base 66: mod_base = OTHER; note = 2'-O-methyl nucleotide
  modified_base 67: mod_base = OTHER; note = 2'-O-methyl nucleotide
  modified_base 68: mod_base = OTHER; note = 2'-O-methyl nucleotide
  modified_base 69: mod_base = OTHER; note = 2'-O-methyl nucleotide
  modified_base 70: mod_base = OTHER; note = 2'-O-methyl nucleotide
  modified_base 75: mod_base = OTHER; note = 2'-O-methyl nucleotide
  modified_base 77: mod_base = OTHER; note = 2'-O-methyl nucleotide
  modified_base 80: mod_base = OTHER; note = 2'-O-methyl nucleotide
  modified_base 86: mod_base = OTHER; note = 2'-O-methyl nucleotide
  modified_base 87: mod_base = OTHER; note = 2'-O-methyl nucleotide
  modified_base 89: mod_base = OTHER; note = 2'-O-methyl nucleotide
  modified_base 90: mod_base = OTHER; note = 2'-O-methyl nucleotide
  modified_base 91: mod_base = OTHER; note = 2'-O-methyl nucleotide
  modified_base 92: mod_base = OTHER; note = 2'-O-methyl nucleotide
  modified_base 99: mod_base = OTHER; note = phosphorothioate linkage
  modified_base 100: mod_base = OTHER; note = 2'-O-methyl nucleotide, phosphorothioate linkage
  modified_base 101: mod_base = OTHER; note = 2'-O-methyl nucleotide
  source 1..101: mol_type = other RNA

SEQ ID NO: 455-460 - skipped (6 entries)

SEQ ID NO: 461 - RNA, 100 nt, synthetic construct; identical to SEQ ID NO: 431
  misc_feature 1..100: note = Synthetic
  modified_base 1: mod_base = OTHER; note = 2'-O-methyl nucleotide, phosphorothioate linkage
  modified_base 2: mod_base = OTHER; note = 2'-O-methyl nucleotide, phosphorothioate linkage
  modified_base 3: mod_base = OTHER; note = 2'-O-methyl nucleotide, phosphorothioate linkage
  modified_base 29: mod_base = OTHER; note = 2'-O-methyl nucleotide
  modified_base 30: mod_base = OTHER; note = 2'-O-methyl nucleotide
  modified_base 31: mod_base = OTHER; note = 2'-O-methyl nucleotide
  modified_base 32: mod_base = OTHER; note = 2'-O-methyl nucleotide
  modified_base 33: mod_base = OTHER; note = 2'-O-methyl nucleotide
  modified_base 34: mod_base = OTHER; note = 2'-O-methyl nucleotide
  modified_base 35: mod_base = OTHER; note = 2'-O-methyl nucleotide
  modified_base 36: mod_base = OTHER; note = 2'-O-methyl nucleotide
  modified_base 37: mod_base = OTHER; note = 2'-O-methyl nucleotide
  modified_base 38: mod_base = OTHER; note = 2'-O-methyl nucleotide
  modified_base 39: mod_base = OTHER; note = 2'-O-methyl nucleotide
  modified_base 40: mod_base = OTHER; note = 2'-O-methyl nucleotide
  modified_base 69: mod_base = OTHER; note = 2'-O-methyl nucleotide
  modified_base 70: mod_base = OTHER; note = 2'-O-methyl nucleotide
  modified_base 71: mod_base = OTHER; note = 2'-O-methyl nucleotide
  modified_base 72: mod_base = OTHER; note = 2'-O-methyl nucleotide
  modified_base 73: mod_base = OTHER; note = 2'-O-methyl nucleotide
  modified_base 74: mod_base = OTHER; note = 2'-O-methyl nucleotide
  modified_base 75: mod_base = OTHER; note = 2'-O-methyl nucleotide
  modified_base 76: mod_base = OTHER; note = 2'-O-methyl nucleotide
  modified_base 77: mod_base = OTHER; note = 2'-O-methyl nucleotide
  modified_base 78: mod_base = OTHER; note = 2'-O-methyl nucleotide
  modified_base 79: mod_base = OTHER; note = 2'-O-methyl nucleotide
  modified_base 80: mod_base = OTHER; note = 2'-O-methyl nucleotide
  modified_base 81: mod_base = OTHER; note = 2'-O-methyl nucleotide
  modified_base 82: mod_base = OTHER; note = 2'-O-methyl nucleotide
  modified_base 83: mod_base = OTHER; note = 2'-O-methyl nucleotide
  modified_base 84: mod_base = OTHER; note = 2'-O-methyl nucleotide
  modified_base 85: mod_base = OTHER; note = 2'-O-methyl nucleotide
  modified_base 86: mod_base = OTHER; note = 2'-O-methyl nucleotide
  modified_base 87: mod_base = OTHER; note = 2'-O-methyl nucleotide
  modified_base 88: mod_base = OTHER; note = 2'-O-methyl nucleotide
  modified_base 89: mod_base = OTHER; note = 2'-O-methyl nucleotide
  modified_base 90: mod_base = OTHER; note = 2'-O-methyl nucleotide
  modified_base 91: mod_base = OTHER; note = 2'-O-methyl nucleotide
  modified_base 92: mod_base = OTHER; note = 2'-O-methyl nucleotide
  modified_base 93: mod_base = OTHER; note = 2'-O-methyl nucleotide
  modified_base 94: mod_base = OTHER; note = 2'-O-methyl nucleotide
  modified_base 95: mod_base = OTHER; note = 2'-O-methyl nucleotide
  modified_base 96: mod_base = OTHER; note = 2'-O-methyl nucleotide
  modified_base 97: mod_base = OTHER; note = 2'-O-methyl nucleotide, phosphorothioate linkage
  modified_base 98: mod_base = OTHER; note = 2'-O-methyl nucleotide, phosphorothioate linkage
  modified_base 99: mod_base = OTHER; note = 2'-O-methyl nucleotide, phosphorothioate linkage
  modified_base 100: mod_base = OTHER; note = 2'-O-methyl nucleotide
  source 1..100: mol_type = other RNA

SEQ ID NO: 462 - RNA, 100 nt, synthetic construct; identical to SEQ ID NO: 432
  misc_feature 1..100: note = Synthetic
  modified_base 1: mod_base = OTHER; note = 2'-O-methyl nucleotide, phosphorothioate linkage
  modified_base 2: mod_base = OTHER; note = 2'-O-methyl nucleotide, phosphorothioate linkage
  modified_base 4: mod_base = OTHER; note = 2'-O-methyl nucleotide, phosphorothioate linkage
  modified_base 29: mod_base = OTHER; note = 2'-O-methyl nucleotide
  modified_base 30: mod_base = OTHER; note = 2'-O-methyl nucleotide
  modified_base 31: mod_base = OTHER; note = 2'-O-methyl nucleotide
  modified_base 32: mod_base = OTHER; note = 2'-O-methyl nucleotide
  modified_base 33: mod_base = OTHER; note = 2'-O-methyl nucleotide
  modified_base 34: mod_base = OTHER; note = 2'-O-methyl nucleotide
  modified_base 35: mod_base = OTHER; note = 2'-O-methyl nucleotide
  modified_base 36: mod_base = OTHER; note = 2'-O-methyl nucleotide
  modified_base 37: mod_base = OTHER; note = 2'-O-methyl nucleotide
  modified_base 38: mod_base = OTHER; note = 2'-O-methyl nucleotide
  modified_base 39: mod_base = OTHER; note = 2'-O-methyl nucleotide
  modified_base 40: mod_base = OTHER; note = 2'-O-methyl nucleotide
  modified_base 69: mod_base = OTHER; note = 2'-O-methyl nucleotide
  modified_base 70: mod_base = OTHER; note = 2'-O-methyl nucleotide
  modified_base 71: mod_base = OTHER; note = 2'-O-methyl nucleotide
  modified_base 72: mod_base = OTHER; note = 2'-O-methyl nucleotide
  modified_base 73: mod_base = OTHER; note = 2'-O-methyl nucleotide
  modified_base 74: mod_base = OTHER; note = 2'-O-methyl nucleotide
  modified_base 75: mod_base = OTHER; note = 2'-O-methyl nucleotide
  modified_base 76: mod_base = OTHER; note = 2'-O-methyl nucleotide
  modified_base 77: mod_base = OTHER; note = 2'-O-methyl nucleotide
  modified_base 78: mod_base = OTHER; note = 2'-O-methyl nucleotide
  modified_base 79: mod_base = OTHER; note = 2'-O-methyl nucleotide
  modified_base 80: mod_base = OTHER; note = 2'-O-methyl nucleotide
  modified_base 81: mod_base = OTHER; note = 2'-O-methyl nucleotide
  modified_base 82: mod_base = OTHER; note = 2'-O-methyl nucleotide
  modified_base 83: mod_base = OTHER; note = 2'-O-methyl nucleotide
  modified_base 84: mod_base = OTHER; note = 2'-O-methyl nucleotide
  modified_base 85: mod_base = OTHER; note = 2'-O-methyl nucleotide
  modified_base 86: mod_base = OTHER; note = 2'-O-methyl nucleotide
  modified_base 87: mod_base = OTHER; note = 2'-O-methyl nucleotide
  modified_base 88: mod_base = OTHER; note = 2'-O-methyl nucleotide
  modified_base 89: mod_base = OTHER; note = 2'-O-methyl nucleotide
  modified_base 90: mod_base = OTHER; note = 2'-O-methyl nucleotide
  modified_base 91: mod_base = OTHER; note = 2'-O-methyl nucleotide
  modified_base 92: mod_base = OTHER; note = 2'-O-methyl nucleotide
  modified_base 93: mod_base = OTHER; note = 2'-O-methyl nucleotide
  modified_base 94: mod_base = OTHER; note = 2'-O-methyl nucleotide
  modified_base 95: mod_base = OTHER; note = 2'-O-methyl nucleotide
  modified_base 96: mod_base = OTHER; note = 2'-O-methyl nucleotide
  modified_base 97: mod_base = OTHER; note = 2'-O-methyl nucleotide, phosphorothioate linkage
  modified_base 98: mod_base = OTHER; note = 2'-O-methyl nucleotide, phosphorothioate linkage
  modified_base 99: mod_base = OTHER; note = 2'-O-methyl nucleotide, phosphorothioate linkage
  modified_base 100: mod_base = OTHER; note = 2'-O-methyl nucleotide
  source 1..100: mol_type = other RNA

SEQ ID NO: 463 - RNA, 100 nt, synthetic construct; identical to SEQ ID NO: 433
  misc_feature 1..100: note = Synthetic
  modified_base 1: mod_base = OTHER; note = 2'-O-methyl nucleotide, phosphorothioate linkage
  modified_base 2: mod_base = OTHER; note = 2'-O-methyl nucleotide, phosphorothioate linkage
  modified_base 3: mod_base = OTHER; note = 2'-O-methyl nucleotide, phosphorothioate linkage
  modified_base 29: mod_base = OTHER; note = 2'-O-methyl nucleotide
  modified_base 30: mod_base = OTHER; note = 2'-O-methyl nucleotide
  modified_base 31: mod_base = OTHER; note = 2'-O-methyl nucleotide
  modified_base 32: mod_base = OTHER; note = 2'-O-methyl nucleotide
  modified_base 33: mod_base = OTHER; note = 2'-O-methyl nucleotide
  modified_base 34: mod_base = OTHER; note = 2'-O-methyl nucleotide
  modified_base 35: mod_base = OTHER; note = 2'-O-methyl nucleotide
  modified_base 36: mod_base = OTHER; note = 2'-O-methyl nucleotide
  modified_base 37: mod_base = OTHER; note = 2'-O-methyl nucleotide
  modified_base 38: mod_base = OTHER; note = 2'-O-methyl nucleotide
  modified_base 39: mod_base = OTHER; note = 2'-O-methyl nucleotide
  modified_base 40: mod_base = OTHER; note = 2'-O-methyl nucleotide
  modified_base 69: mod_base = OTHER; note = 2'-O-methyl nucleotide
  modified_base 70: mod_base = OTHER; note = 2'-O-methyl nucleotide
  modified_base 71: mod_base = OTHER; note = 2'-O-methyl nucleotide
  modified_base 72: mod_base = OTHER; note = 2'-O-methyl nucleotide
  modified_base 73: mod_base = OTHER; note = 2'-O-methyl nucleotide
  modified_base 74: mod_base = OTHER; note = 2'-O-methyl nucleotide
  modified_base 75: mod_base = OTHER; note = 2'-O-methyl nucleotide
  modified_base 76: mod_base = OTHER; note = 2'-O-methyl nucleotide
  modified_base 77: mod_base = OTHER; note = 2'-O-methyl nucleotide
  modified_base 78: mod_base = OTHER; note = 2'-O-methyl nucleotide
  modified_base 79: mod_base = OTHER; note = 2'-O-methyl nucleotide
  modified_base 80: mod_base = OTHER; note = 2'-O-methyl nucleotide
  modified_base 81: mod_base = OTHER; note = 2'-O-methyl nucleotide
  modified_base 82: mod_base = OTHER; note = 2'-O-methyl nucleotide
  modified_base 83: mod_base = OTHER; note = 2'-O-methyl nucleotide
  modified_base 84: mod_base = OTHER; note = 2'-O-methyl nucleotide
  modified_base 85: mod_base = OTHER; note = 2'-O-methyl nucleotide
  modified_base 86: mod_base = OTHER; note = 2'-O-methyl nucleotide
  modified_base 87: mod_base = OTHER; note = 2'-O-methyl nucleotide
  modified_base 88: mod_base = OTHER; note = 2'-O-methyl nucleotide
  modified_base 89: mod_base = OTHER; note = 2'-O-methyl nucleotide
  modified_base 90: mod_base = OTHER; note = 2'-O-methyl nucleotide
  modified_base 91: mod_base = OTHER; note = 2'-O-methyl nucleotide
  modified_base 92: mod_base = OTHER; note = 2'-O-methyl nucleotide
  modified_base 93: mod_base = OTHER; note = 2'-O-methyl nucleotide
  modified_base 94: mod_base = OTHER; note = 2'-O-methyl nucleotide
  modified_base 95: mod_base = OTHER; note = 2'-O-methyl nucleotide
  modified_base 96: mod_base = OTHER; note = 2'-O-methyl nucleotide
  modified_base 97: mod_base = OTHER; note = 2'-O-methyl nucleotide, phosphorothioate linkage
  modified_base 98: mod_base = OTHER; note = 2'-O-methyl nucleotide, phosphorothioate linkage
  modified_base 99: mod_base = OTHER; note = 2'-O-methyl nucleotide, phosphorothioate linkage
  modified_base 100: mod_base = OTHER; note = 2'-O-methyl nucleotide
  source 1..100: mol_type = other RNA

SEQ ID NO: 464 - RNA, 91 nt, synthetic construct; identical to SEQ ID NO: 434
  misc_feature 1..91: note = Synthetic
  modified_base 1: mod_base = OTHER; note = 2'-O-methyl nucleotide, phosphorothioate linkage
  modified_base 2: mod_base = OTHER; note = 2'-O-methyl nucleotide, phosphorothioate linkage
  modified_base 3: mod_base = OTHER; note = 2'-O-methyl nucleotide, phosphorothioate linkage
  modified_base 29: mod_base = OTHER; note = 2'-O-methyl nucleotide
  modified_base 30: mod_base = OTHER; note = 2'-O-methyl nucleotide
  modified_base 31: mod_base = OTHER; note = 2'-O-methyl nucleotide
  modified_base 32: mod_base = OTHER; note = 2'-O-methyl nucleotide
  modified_base 33: mod_base = OTHER; note = 2'-O-methyl nucleotide
  modified_base 34: mod_base = OTHER; note = 2'-O-methyl nucleotide
  modified_base 35: mod_base = OTHER; note = 2'-O-methyl nucleotide
  modified_base 36: mod_base = OTHER; note = 2'-O-methyl nucleotide
  modified_base 37: mod_base = OTHER; note = 2'-O-methyl nucleotide
  modified_base 38: mod_base = OTHER; note = 2'-O-methyl nucleotide
  modified_base 39: mod_base = OTHER; note = 2'-O-methyl nucleotide
  modified_base 40: mod_base = OTHER; note = 2'-O-methyl nucleotide
  modified_base 88: mod_base = OTHER; note = 2'-O-methyl nucleotide, phosphorothioate linkage
  modified_base 89: mod_base = OTHER; note = 2'-O-methyl nucleotide, phosphorothioate linkage
  modified_base 90: mod_base = OTHER; note = 2'-O-methyl nucleotide, phosphorothioate linkage
  modified_base 91: mod_base = OTHER; note = 2'-O-methyl nucleotide
  source 1..91: mol_type = other RNA

SEQ ID NO: 465-598 - skipped (134 entries)

SEQ ID NO: 599 - RNA, 22 nt, synthetic construct
  misc_feature 1..22: note = Synthetic
  source 1..22: mol_type = other RNA
gttttagagctatgctgttttg

SEQ ID NO: 600 - RNA, 80 nt, synthetic construct
  misc_feature 1..80: note = Synthetic
  source 1..80: mol_type = other RNA
gttttagagctagaaatagcaagttaaaataaggctagtccgttatcaacttgaaaaagtggcaccgagtcggtgctttt

SEQ ID NO: 601 - RNA, 76 nt, synthetic construct
  misc_feature 1..76: note = Synthetic
  source 1..76: mol_type = other RNA
gttttagagctagaaatagcaagttaaaataaggctagtccgttatcaacttgaaaaagtggcaccgagtcggtgc

SEQ ID NO: 602 - RNA, 77 nt, synthetic construct
  misc_feature 1..77: note = Synthetic
  source 1..77: mol_type = other RNA
gttttagagctagaaatagcaagttaaaataaggctagtccgttatcaacttgaaaaagtggcaccgagtcggtgct

SEQ ID NO: 603 - RNA, 68 nt, synthetic construct
  misc_feature 1..68: note = Synthetic
  source 1..68: mol_type = other RNA
gttttagagctagaaatagcaagttaaaataaggctagtccgttatcaacttggcaccgagtcggtgc

SEQ ID NO: 604 - RNA, 68 nt, synthetic construct
  misc_feature 1..68: note = Synthetic
  source 1..68: mol_type = other RNA
gttttagagctagaaatagcaagttaaaataaggctagtccgttatcaaaatggcaccgagtcggtgc

SEQ ID NO: 605 - RNA, 69 nt, synthetic construct
  misc_feature 1..69: note = Synthetic
  source 1..69: mol_type = other RNA
ggttttagagctagaaatagcaagttaaaataaggctagtccgttatcaaaatggcaccgagtcggtgc

SEQ ID NO: 606 - RNA, 70 nt, synthetic construct
  misc_feature 1..70: note = Synthetic
  source 1..70: mol_type = other RNA
gttttagagctagaaatagcaagttaaaataaggctagtccgttatcacgaaagggcaccgagtcggtgc

SEQ ID NO: 607 - RNA, 71 nt, synthetic construct
  misc_feature 1..71: note = Synthetic
  source 1..71: mol_type = other RNA
gttttagagctagaaatagcaagttaaaataaggctagtccgttatcacgaaagggcaccgagtcggtgct

SEQ ID NO: 608-609 - skipped (2 entries)

SEQ ID NO: 610 - RNA, 100 nt, synthetic construct
  misc_feature 1..100: note = Synthetic
  variation 1..20: note = n is a, c, g, or u
  source 1..100: mol_type = other RNA
nnnnnnnnnnnnnnnnnnnngttttagagctagaaatagcaagttaaaataaggctagtccgttatcaacttgaaaaagtggcaccgagtcggtgctttt

SEQ ID NO: 611 - RNA, 96 nt, synthetic construct
  misc_feature 1..96: note = Synthetic
  variation 1..20: note = n is a, c, g, or u
  source 1..96: mol_type = other RNA
nnnnnnnnnnnnnnnnnnnngttttagagctagaaatagcaagttaaaataaggctagtccgttatcaacttgaaaaagtggcaccgagtcggtgc

SEQ ID NO: 612 - RNA, 97 nt, synthetic construct
  misc_feature 1..97: note = Synthetic
  variation 1..20: note = n is a, c, g, or u
  source 1..97: mol_type = other RNA
nnnnnnnnnnnnnnnnnnnngttttagagctagaaatagcaagttaaaataaggctagtccgttatcaacttgaaaaagtggcaccgagtcggtgct

SEQ ID NO: 613 - RNA, 88 nt, synthetic construct
  misc_feature 1..88: note = Synthetic
  variation 1..20: note = n is a, c, g, or u
  source 1..88: mol_type = other RNA
nnnnnnnnnnnnnnnnnnnngttttagagctagaaatagcaagttaaaataaggctagtccgttatcaacttggcaccgagtcggtgc

SEQ ID NO: 614 - RNA, 88 nt, synthetic construct
  misc_feature 1..88: note = Synthetic
  variation 1..20: note = n is a, c, g, or u
  source 1..88: mol_type = other RNA
nnnnnnnnnnnnnnnnnnnngttttagagctagaaatagcaagttaaaataaggctagtccgttatcaaaatggcaccgagtcggtgc

SEQ ID NO: 615 - RNA, 89 nt, synthetic construct
  misc_feature 1..89: note = Synthetic
  variation 1..20: note = n is a, c, g, or u
  source 1..89: mol_type = other RNA
nnnnnnnnnnnnnnnnnnnnggttttagagctagaaatagcaagttaaaataaggctagtccgttatcaaaatggcaccgagtcggtgc

SEQ ID NO: 616 - RNA, 90 nt, synthetic construct
  misc_feature 1..90: note = Synthetic
  variation 1..20: note = n is a, c, g, or u
  source 1..90: mol_type = other RNA
nnnnnnnnnnnnnnnnnnnngttttagagctagaaatagcaagttaaaataaggctagtccgttatcacgaaagggcaccgagtcggtgc

SEQ ID NO: 617 - RNA, 91 nt, synthetic construct
  misc_feature 1..91: note = Synthetic
  variation 1..20: note = n is a, c, g, or u
  source 1..91: mol_type = other RNA
nnnnnnnnnnnnnnnnnnnngttttagagctagaaatagcaagttaaaataaggctagtccgttatcacgaaagggcaccgagtcggtgct

SEQ ID NO: 618-619 - skipped (2 entries)

SEQ ID NO: 620 - RNA, 80 nt, synthetic construct; identical to SEQ ID NO: 600
  misc_feature 1..80: note = Synthetic
  modified_base 9: mod_base = OTHER; note = 2'-O-methyl nucleotide
  modified_base 10: mod_base = OTHER; note = 2'-O-methyl nucleotide
  modified_base 11: mod_base = OTHER; note = 2'-O-methyl nucleotide
  modified_base 12: mod_base = OTHER; note = 2'-O-methyl nucleotide
  modified_base 13: mod_base = OTHER; note = 2'-O-methyl nucleotide
  modified_base 14: mod_base = OTHER; note = 2'-O-methyl nucleotide
  modified_base 15: mod_base = OTHER; note = 2'-O-methyl nucleotide
  modified_base 16: mod_base = OTHER; note = 2'-O-methyl nucleotide
  modified_base 17: mod_base = OTHER; note = 2'-O-methyl nucleotide
  modified_base 18: mod_base = OTHER; note = 2'-O-methyl nucleotide
  modified_base 19: mod_base = OTHER; note = 2'-O-methyl nucleotide
  modified_base 20: mod_base = OTHER; note = 2'-O-methyl nucleotide
  modified_base 49: mod_base = OTHER; note = 2'-O-methyl nucleotide
  modified_base 50: mod_base = OTHER; note = 2'-O-methyl nucleotide
  modified_base 51: mod_base = OTHER; note = 2'-O-methyl nucleotide
  modified_base 52: mod_base = OTHER; note = 2'-O-methyl nucleotide
  modified_base 53: mod_base = OTHER; note = 2'-O-methyl nucleotide
  modified_base 54: mod_base = OTHER; note = 2'-O-methyl nucleotide
  modified_base 55: mod_base = OTHER; note = 2'-O-methyl nucleotide
  modified_base 56: mod_base = OTHER; note = 2'-O-methyl nucleotide
  modified_base 57: mod_base = OTHER; note = 2'-O-methyl nucleotide
  modified_base 58: mod_base = OTHER; note = 2'-O-methyl nucleotide
  modified_base 59: mod_base = OTHER; note = 2'-O-methyl nucleotide
  modified_base 60: mod_base = OTHER; note = 2'-O-methyl nucleotide
  modified_base 61: mod_base = OTHER; note = 2'-O-methyl nucleotide
  modified_base 62: mod_base = OTHER; note = 2'-O-methyl nucleotide
  modified_base 63: mod_base = OTHER; note = 2'-O-methyl nucleotide
  modified_base 64: mod_base = OTHER; note = 2'-O-methyl nucleotide
  modified_base 65: mod_base = OTHER; note = 2'-O-methyl nucleotide
  modified_base 66: mod_base = OTHER; note = 2'-O-methyl nucleotide
  modified_base 67: mod_base = OTHER; note = 2'-O-methyl nucleotide
  modified_base 68: mod_base = OTHER; note = 2'-O-methyl nucleotide
  modified_base 69: mod_base = OTHER; note = 2'-O-methyl nucleotide
  modified_base 70: mod_base = OTHER; note = 2'-O-methyl nucleotide
  modified_base 71: mod_base = OTHER; note = 2'-O-methyl nucleotide
  modified_base 72: mod_base = OTHER; note = 2'-O-methyl nucleotide
  modified_base 73: mod_base = OTHER; note = 2'-O-methyl nucleotide
  modified_base 74: mod_base = OTHER; note = 2'-O-methyl nucleotide
  modified_base 75: mod_base = OTHER; note = 2'-O-methyl nucleotide
  modified_base 76: mod_base = OTHER; note = 2'-O-methyl nucleotide
  modified_base 77: mod_base = OTHER; note = 2'-O-methyl nucleotide, phosphorothioate linkage
  modified_base 78: mod_base = OTHER; note = 2'-O-methyl nucleotide, phosphorothioate linkage
  modified_base 79: mod_base = OTHER; note = 2'-O-methyl nucleotide, phosphorothioate linkage
  modified_base 80: mod_base = OTHER; note = 2'-O-methyl nucleotide
  source 1..80: mol_type = other RNA

SEQ ID NO: 621-629 - skipped (9 entries)

SEQ ID NO: 630 - RNA, 76 nt, synthetic construct; identical to SEQ ID NO: 601
  misc_feature 1..76: note = Synthetic
  modified_base 9: mod_base = OTHER; note = 2'-O-methyl nucleotide
  modified_base 10: mod_base = OTHER; note = 2'-O-methyl nucleotide
  modified_base 11: mod_base = OTHER; note = 2'-O-methyl nucleotide
  modified_base 12: mod_base = OTHER; note = 2'-O-methyl nucleotide
  modified_base 13: mod_base = OTHER; note = 2'-O-methyl nucleotide
  modified_base 14: mod_base = OTHER; note = 2'-O-methyl nucleotide
  modified_base 15: mod_base = OTHER; note = 2'-O-methyl nucleotide
  modified_base 16: mod_base = OTHER; note = 2'-O-methyl nucleotide
  modified_base 17: mod_base = OTHER; note = 2'-O-methyl nucleotide
  modified_base 18: mod_base = OTHER; note = 2'-O-methyl nucleotide
  modified_base 19: mod_base = OTHER; note = 2'-O-methyl nucleotide
  modified_base 20: mod_base = OTHER; note = 2'-O-methyl nucleotide
  modified_base 49: mod_base = OTHER; note = 2'-O-methyl nucleotide
  modified_base 50: mod_base = OTHER; note = 2'-O-methyl nucleotide
  modified_base 51: mod_base = OTHER; note = 2'-O-methyl nucleotide
  modified_base 52: mod_base = OTHER; note = 2'-O-methyl nucleotide
  modified_base 53: mod_base = OTHER; note = 2'-O-methyl nucleotide
  modified_base 54: mod_base = OTHER; note = 2'-O-methyl nucleotide
  modified_base 55: mod_base = OTHER; note = 2'-O-methyl nucleotide
  modified_base 56: mod_base = OTHER; note = 2'-O-methyl nucleotide
  modified_base 57: mod_base = OTHER; note = 2'-O-methyl nucleotide
  modified_base 58: mod_base = OTHER; note = 2'-O-methyl nucleotide
  modified_base 59: mod_base = OTHER; note = 2'-O-methyl nucleotide
  modified_base 60: mod_base = OTHER; note = 2'-O-methyl nucleotide
  modified_base 61: mod_base = OTHER; note = 2'-O-methyl nucleotide
  modified_base 62: mod_base = OTHER; note = 2'-O-methyl nucleotide
  modified_base 63: mod_base = OTHER; note = 2'-O-methyl nucleotide
  modified_base 64: mod_base = OTHER; note = 2'-O-methyl nucleotide
  modified_base 65: mod_base = OTHER; note = 2'-O-methyl nucleotide
  modified_base 66: mod_base = OTHER; note = 2'-O-methyl nucleotide
  modified_base 67: mod_base = OTHER; note = 2'-O-methyl nucleotide
  modified_base 68: mod_base = OTHER; note = 2'-O-methyl nucleotide
  modified_base 69: mod_base = OTHER; note = 2'-O-methyl nucleotide
  modified_base 70: mod_base = OTHER; note = 2'-O-methyl nucleotide
  modified_base 71: mod_base = OTHER; note = 2'-O-methyl nucleotide
  modified_base 72: mod_base = OTHER; note = 2'-O-methyl nucleotide
  modified_base 73: mod_base = OTHER; note = 2'-O-methyl nucleotide
  modified_base 74: mod_base = OTHER; note = 2'-O-methyl nucleotide
  modified_base 75: mod_base = OTHER; note = 2'-O-methyl nucleotide
  modified_base 76: mod_base = OTHER; note = 2'-O-methyl nucleotide
  source 1..76: mol_type = other RNA

SEQ ID NO: 631 - RNA, 77 nt, synthetic construct; identical to SEQ ID NO: 602
  misc_feature 1..77: note = Synthetic
  modified_base 9: mod_base = OTHER; note = 2'-O-methyl nucleotide
  modified_base 10: mod_base = OTHER; note = 2'-O-methyl nucleotide
  modified_base 11: mod_base = OTHER; note = 2'-O-methyl nucleotide
  modified_base 12: mod_base = OTHER; note = 2'-O-methyl nucleotide
  modified_base 13: mod_base = OTHER; note = 2'-O-methyl nucleotide
  modified_base 14: mod_base = OTHER; note = 2'-O-methyl nucleotide
  modified_base 15: mod_base = OTHER; note = 2'-O-methyl nucleotide
  modified_base 16: mod_base = OTHER; note = 2'-O-methyl nucleotide
  modified_base 17: mod_base = OTHER; note = 2'-O-methyl nucleotide
  modified_base 18: mod_base = OTHER; note = 2'-O-methyl nucleotide
  modified_base 19: mod_base = OTHER; note = 2'-O-methyl nucleotide
  modified_base 20: mod_base = OTHER; note = 2'-O-methyl nucleotide
  modified_base 49: mod_base = OTHER; note = 2'-O-methyl nucleotide
  modified_base 50: mod_base = OTHER; note = 2'-O-methyl nucleotide
  modified_base 51: mod_base = OTHER; note = 2'-O-methyl nucleotide
  modified_base 52: mod_base = OTHER; note = 2'-O-methyl nucleotide
  modified_base 53: mod_base = OTHER; note = 2'-O-methyl nucleotide
  modified_base 54: mod_base = OTHER; note = 2'-O-methyl nucleotide
  modified_base 55: mod_base = OTHER; note = 2'-O-methyl nucleotide
  modified_base 56: mod_base = OTHER; note = 2'-O-methyl nucleotide
  modified_base 57: mod_base = OTHER; note = 2'-O-methyl nucleotide
  modified_base 58: mod_base = OTHER; note = 2'-O-methyl nucleotide
  modified_base 59: mod_base = OTHER; note = 2'-O-methyl nucleotide
  modified_base 60: mod_base = OTHER; note = 2'-O-methyl nucleotide
  modified_base 61: mod_base = OTHER; note = 2'-O-methyl nucleotide
  modified_base 62: mod_base = OTHER; note = 2'-O-methyl nucleotide
  modified_base 63: mod_base = OTHER; note = 2'-O-methyl nucleotide
  modified_base 64: mod_base = OTHER; note = 2'-O-methyl nucleotide
  modified_base 65: mod_base = OTHER; note = 2'-O-methyl nucleotide
  modified_base 66: mod_base = OTHER; note = 2'-O-methyl nucleotide
  modified_base 67: mod_base = OTHER; note = 2'-O-methyl nucleotide
  modified_base 68: mod_base = OTHER; note = 2'-O-methyl nucleotide
  modified_base 69: mod_base = OTHER; note = 2'-O-methyl nucleotide
  modified_base 70: mod_base = OTHER; note = 2'-O-methyl nucleotide
  modified_base 71: mod_base = OTHER; note = 2'-O-methyl nucleotide
  modified_base 72: mod_base = OTHER; note = 2'-O-methyl nucleotide
  modified_base 73: mod_base = OTHER; note = 2'-O-methyl nucleotide
  modified_base 74: mod_base = OTHER; note = 2'-O-methyl nucleotide
  modified_base 75: mod_base = OTHER; note = 2'-O-methyl nucleotide
  modified_base 76: mod_base = OTHER; note = 2'-O-methyl nucleotide
  modified_base 77: mod_base = OTHER; note = 2'-O-methyl nucleotide
  source 1..77: mol_type = other RNA

SEQ ID NO: 632 - RNA, 68 nt, synthetic construct; identical to SEQ ID NO: 603
  misc_feature 1..68: note = Synthetic
  modified_base 9: mod_base = OTHER; note = 2'-O-methyl nucleotide
  modified_base 10: mod_base = OTHER; note = 2'-O-methyl nucleotide
  modified_base 11: mod_base = OTHER; note = 2'-O-methyl nucleotide
  modified_base 12: mod_base = OTHER; note = 2'-O-methyl nucleotide
  modified_base 13: mod_base = OTHER; note = 2'-O-methyl nucleotide
  modified_base 14: mod_base = OTHER; note = 2'-O-methyl nucleotide
  modified_base 15: mod_base = OTHER; note = 2'-O-methyl nucleotide
  modified_base 16: mod_base = OTHER; note = 2'-O-methyl nucleotide
  modified_base 17: mod_base = OTHER; note = 2'-O-methyl nucleotide
  modified_base 18: mod_base = OTHER; note = 2'-O-methyl nucleotide
  modified_base 19: mod_base = OTHER; note = 2'-O-methyl nucleotide
  modified_base 20: mod_base = OTHER; note = 2'-O-methyl nucleotide
  modified_base 65: mod_base = OTHER; note = phosphorothioate linkage
  modified_base 66: mod_base = OTHER; note = 2'-O-methyl nucleotide, phosphorothioate linkage
  modified_base 67: mod_base = OTHER; note = 2'-O-methyl nucleotide, phosphorothioate linkage
  modified_base 68: mod_base = OTHER; note = 2'-O-methyl nucleotide
  source 1..68: mol_type = other RNA

SEQ ID NO: 633 - skipped

SEQ ID NO: 634 - RNA, 68 nt, synthetic construct; identical to SEQ ID NO: 604
  misc_feature 1..68: note = Synthetic
  modified_base 9: mod_base = OTHER; note = 2'-O-methyl nucleotide
  modified_base 10: mod_base = OTHER; note = 2'-O-methyl nucleotide
  modified_base 11: mod_base = OTHER; note = 2'-O-methyl nucleotide
  modified_base 12: mod_base = OTHER; note = 2'-O-methyl nucleotide
  modified_base 13: mod_base = OTHER; note = 2'-O-methyl nucleotide
  modified_base 14: mod_base = OTHER; note = 2'-O-methyl nucleotide
  modified_base 15: mod_base = OTHER; note = 2'-O-methyl nucleotide
  modified_base 16: mod_base = OTHER; note = 2'-O-methyl nucleotide
  modified_base 17: mod_base = OTHER; note = 2'-O-methyl nucleotide
  modified_base 18: mod_base = OTHER; note = 2'-O-methyl nucleotide
  modified_base 19: mod_base = OTHER; note = 2'-O-methyl nucleotide
  modified_base 20: mod_base = OTHER; note = 2'-O-methyl nucleotide
  modified_base 65: mod_base = OTHER; note = phosphorothioate linkage
  modified_base 66: mod_base = OTHER; note = 2'-O-methyl nucleotide, phosphorothioate linkage
  modified_base 67: mod_base = OTHER; note = 2'-O-methyl nucleotide, phosphorothioate linkage
  modified_base 68: mod_base = OTHER; note = 2'-O-methyl nucleotide
  source 1..68: mol_type = other RNA

SEQ ID NO: 635 - RNA, 68 nt, synthetic construct; identical to SEQ ID NO: 604
  misc_feature 1..68: note = Synthetic
  modified_base 9: mod_base = OTHER; note = 2'-O-methyl nucleotide
  modified_base 10: mod_base = OTHER; note = 2'-O-methyl nucleotide
  modified_base 11: mod_base = OTHER; note = 2'-O-methyl nucleotide
  modified_base 12: mod_base = OTHER; note = 2'-O-methyl nucleotide
  modified_base 13: mod_base = OTHER; note = 2'-O-methyl nucleotide
  modified_base 14: mod_base = OTHER; note = 2'-O-methyl nucleotide
  modified_base 15: mod_base = OTHER; note = 2'-O-methyl nucleotide
  modified_base 16: mod_base = OTHER; note = 2'-O-methyl nucleotide
  modified_base 17: mod_base = OTHER; note = 2'-O-methyl nucleotide
  modified_base 18: mod_base = OTHER; note = 2'-O-methyl nucleotide
  modified_base 19: mod_base = OTHER; note = 2'-O-methyl nucleotide
  modified_base 20: mod_base = OTHER; note = 2'-O-methyl nucleotide
  modified_base 49: mod_base = OTHER; note = 2'-O-methyl nucleotide
  modified_base 50: mod_base = OTHER; note = 2'-O-methyl nucleotide
  modified_base 51: mod_base = OTHER; note = 2'-O-methyl nucleotide
  modified_base 52: mod_base = OTHER; note = 2'-O-methyl nucleotide
  modified_base 53: mod_base = OTHER; note = 2'-O-methyl nucleotide
  modified_base 54: mod_base = OTHER; note = 2'-O-methyl nucleotide
  modified_base 55: mod_base = OTHER; note = 2'-O-methyl nucleotide
  modified_base 56: mod_base = OTHER; note = 2'-O-methyl nucleotide
  modified_base 57: mod_base = OTHER; note = 2'-O-methyl nucleotide
  modified_base 58: mod_base = OTHER; note = 2'-O-methyl nucleotide
  modified_base 59: mod_base = OTHER; note = 2'-O-methyl nucleotide
  modified_base 60: mod_base = OTHER; note = 2'-O-methyl nucleotide
  modified_base 61: mod_base = OTHER; note = 2'-O-methyl nucleotide
  modified_base 62: mod_base = OTHER; note = 2'-O-methyl nucleotide
  modified_base 63: mod_base = OTHER; note = 2'-O-methyl nucleotide
  modified_base 64: mod_base = OTHER; note = 2'-O-methyl nucleotide
  modified_base 65: mod_base = OTHER; note = 2'-O-methyl nucleotide, phosphorothioate linkage
  modified_base 66: mod_base = OTHER; note = 2'-O-methyl nucleotide, phosphorothioate linkage
  modified_base 67: mod_base = OTHER; note = 2'-O-methyl nucleotide, phosphorothioate linkage
  modified_base 68: mod_base = OTHER; note = 2'-O-methyl nucleotide
  source 1..68: mol_type = other RNA

SEQ ID NO: 636 - RNA, 70 nt, synthetic construct; identical to SEQ ID NO: 606
  misc_feature 1..70: note = Synthetic
  modified_base 9: mod_base = OTHER; note = 2'-O-methyl nucleotide
  modified_base 10: mod_base = OTHER; note = 2'-O-methyl nucleotide
  modified_base 11: mod_base = OTHER; note = 2'-O-methyl nucleotide
  modified_base 12: mod_base = OTHER; note = 2'-O-methyl nucleotide
  modified_base 13: mod_base = OTHER; note = 2'-O-methyl nucleotide
  modified_base 14: mod_base = OTHER; note = 2'-O-methyl nucleotide
  modified_base 15: mod_base = OTHER; note = 2'-O-methyl nucleotide
  modified_base 16: mod_base = OTHER; note = 2'-O-methyl nucleotide
  modified_base 17: mod_base = OTHER; note = 2'-O-methyl nucleotide
  modified_base 18: mod_base = OTHER; note = 2'-O-methyl nucleotide
  modified_base 19: mod_base = OTHER; note = 2'-O-methyl nucleotide
  modified_base 20: mod_base = OTHER; note = 2'-O-methyl nucleotide
  modified_base 67: mod_base = OTHER; note = phosphorothioate linkage
  modified_base 68: mod_base = OTHER; note = 2'-O-methyl nucleotide, phosphorothioate linkage
  modified_base 69: mod_base = OTHER; note = 2'-O-methyl nucleotide, phosphorothioate linkage
  modified_base 70: mod_base = OTHER; note = 2'-O-methyl nucleotide
  source 1..70: mol_type = other RNA

SEQ ID NO: 637 - RNA, 70 nt, synthetic construct; identical to SEQ ID NO: 606
  misc_feature 1..70: note = Synthetic
  modified_base 9: mod_base = OTHER; note = 2'-O-methyl nucleotide
  modified_base 10: mod_base = OTHER; note = 2'-O-methyl nucleotide
  modified_base 11: mod_base = OTHER; note = 2'-O-methyl nucleotide
  modified_base 12: mod_base = OTHER; note = 2'-O-methyl nucleotide
  modified_base 13: mod_base = OTHER; note = 2'-O-methyl nucleotide
  modified_base 14: mod_base = OTHER; note = 2'-O-methyl nucleotide
  modified_base 15: mod_base = OTHER; note = 2'-O-methyl nucleotide
  modified_base 16: mod_base = OTHER; note = 2'-O-methyl nucleotide
  modified_base 17: mod_base = OTHER; note = 2'-O-methyl nucleotide
  modified_base 18: mod_base = OTHER; note = 2'-O-methyl nucleotide
  modified_base 19: mod_base = OTHER; note = 2'-O-methyl nucleotide
  modified_base 20: mod_base = OTHER; note = 2'-O-methyl nucleotide
  modified_base 49: mod_base = OTHER; note = 2'-O-methyl nucleotide
  modified_base 50: mod_base = OTHER; note = 2'-O-methyl nucleotide
  modified_base 51: mod_base = OTHER; note = 2'-O-methyl nucleotide
  modified_base 52: mod_base = OTHER; note = 2'-O-methyl nucleotide
  modified_base 53: mod_base = OTHER; note = 2'-O-methyl nucleotide
  modified_base 54: mod_base = OTHER; note = 2'-O-methyl nucleotide
  modified_base 55: mod_base = OTHER; note = 2'-O-methyl nucleotide
  modified_base 56: mod_base = OTHER; note = 2'-O-methyl nucleotide
  modified_base 57: mod_base = OTHER; note = 2'-O-methyl nucleotide
  modified_base 58: mod_base = OTHER; note = 2'-O-methyl nucleotide
  modified_base 59: mod_base = OTHER; note = 2'-O-methyl nucleotide
  modified_base 60: mod_base = OTHER; note = 2'-O-methyl nucleotide
  modified_base 61: mod_base = OTHER; note = 2'-O-methyl nucleotide
  modified_base 62: mod_base = OTHER; note = 2'-O-methyl nucleotide
  modified_base 63: mod_base = OTHER; note = 2'-O-methyl nucleotide
  modified_base 64: mod_base = OTHER; note = 2'-O-methyl nucleotide
  modified_base 65: mod_base = OTHER; note = 2'-O-methyl nucleotide
  modified_base 66: mod_base = OTHER; note = 2'-O-methyl nucleotide
  modified_base 67: mod_base = OTHER; note = 2'-O-methyl nucleotide, phosphorothioate linkage
  modified_base 68: mod_base = OTHER; note = 2'-O-methyl nucleotide, phosphorothioate linkage
  modified_base 69: mod_base = OTHER; note = 2'-O-methyl nucleotide, phosphorothioate linkage
  modified_base 70: mod_base = OTHER; note = 2'-O-methyl nucleotide
  source 1..70: mol_type = other RNA

SEQ ID NO: 638 - RNA, 71 nt, synthetic construct; identical to SEQ ID NO: 607
  misc_feature 1..71: note = Synthetic
  modified_base 9: mod_base = OTHER; note = 2'-O-methyl nucleotide
  modified_base 10: mod_base = OTHER; note = 2'-O-methyl nucleotide
  modified_base 11: mod_base = OTHER; note = 2'-O-methyl nucleotide
  modified_base 12: mod_base = OTHER; note = 2'-O-methyl nucleotide
  modified_base 13: mod_base = OTHER; note = 2'-O-methyl nucleotide
  modified_base 14: mod_base = OTHER; note = 2'-O-methyl nucleotide
  modified_base 15: mod_base = OTHER; note = 2'-O-methyl nucleotide
  modified_base 16: mod_base = OTHER; note = 2'-O-methyl nucleotide
  modified_base 17: mod_base = OTHER; note = 2'-O-methyl nucleotide
  modified_base 18: mod_base = OTHER; note = 2'-O-methyl nucleotide
  modified_base 19: mod_base = OTHER; note = 2'-O-methyl nucleotide
  modified_base 20: mod_base = OTHER; note = 2'-O-methyl nucleotide
  modified_base 68: mod_base = OTHER; note = phosphorothioate linkage
  modified_base 69: mod_base = OTHER; note = 2'-O-methyl nucleotide, phosphorothioate linkage
  modified_base 70: mod_base = OTHER; note = 2'-O-methyl nucleotide, phosphorothioate linkage
  modified_base 71: mod_base = OTHER; note = 2'-O-methyl nucleotide
  source 1..71: mol_type = other RNA

SEQ ID NO: 639 - RNA, 71 nt, synthetic construct; identical to SEQ ID NO: 607
  misc_feature 1..71: note = Synthetic
  modified_base 9: mod_base = OTHER; note = 2'-O-methyl nucleotide
  modified_base 10: mod_base = OTHER; note = 2'-O-methyl nucleotide
  modified_base 11: mod_base = OTHER; note = 2'-O-methyl nucleotide
  modified_base 12: mod_base = OTHER; note = 2'-O-methyl nucleotide
  modified_base 13: mod_base = OTHER; note = 2'-O-methyl nucleotide
  modified_base 14: mod_base = OTHER; note = 2'-O-methyl nucleotide
  modified_base 15: mod_base = OTHER; note = 2'-O-methyl nucleotide
  modified_base 16: mod_base = OTHER; note = 2'-O-methyl nucleotide
  modified_base 17: mod_base = OTHER; note = 2'-O-methyl nucleotide
  modified_base 18: mod_base = OTHER; note = 2'-O-methyl nucleotide
  modified_base 19: mod_base = OTHER; note = 2'-O-methyl nucleotide
  modified_base 20: mod_base = OTHER; note = 2'-O-methyl nucleotide
  modified_base 68: mod_base = OTHER; note = 2'-O-methyl nucleotide
  modified_base 69: mod_base = OTHER; note = 2'-O-methyl nucleotide
  modified_base 70: mod_base = OTHER; note = 2'-O-methyl nucleotide, phosphorothioate linkage
  modified_base 71: mod_base = OTHER; note = 2'-O-methyl nucleotide
  source 1..71: mol_type = other RNA

SEQ ID NO: 640 - RNA, 71 nt, synthetic construct; identical to SEQ ID NO: 607
  misc_feature 1..71: note = Synthetic
  modified_base 5: mod_base = OTHER; note = 2'-fluoro modification
  modified_base 8: mod_base = OTHER; note = 2'-O-methyl nucleotide
  modified_base 9: mod_base = OTHER; note = 2'-O-methyl nucleotide
  modified_base 10: mod_base = OTHER; note = 2'-O-methyl nucleotide
  modified_base 11: mod_base = OTHER; note = 2'-O-methyl nucleotide
  modified_base 12: mod_base = OTHER; note = 2'-O-methyl nucleotide
  modified_base 13: mod_base = OTHER; note = 2'-O-methyl nucleotide
  modified_base 14: mod_base = OTHER; note = 2'-O-methyl nucleotide
  modified_base 15: mod_base = OTHER; note = 2'-O-methyl nucleotide
  modified_base 16: mod_base = OTHER; note = 2'-O-methyl nucleotide
  modified_base 17: mod_base = OTHER; note = 2'-O-methyl nucleotide
  modified_base 18: mod_base = OTHER; note = 2'-O-methyl nucleotide
  modified_base 19: mod_base = OTHER; note = 2'-O-methyl nucleotide
  modified_base 20: mod_base = OTHER; note = 2'-O-methyl nucleotide
  modified_base 21: mod_base = OTHER; note = 2'-O-methyl nucleotide
  modified_base 22: mod_base = OTHER; note = 2'-O-methyl nucleotide
  modified_base 25: mod_base = OTHER; note = 2'-fluoro modification
  modified_base 26: mod_base = OTHER; note = 2'-O-methyl nucleotide
  modified_base 27: mod_base = OTHER; note = 2'-fluoro modification
  modified_base 28: mod_base = OTHER; note = 2'-O-methyl nucleotide
  modified_base 29: mod_base = OTHER; note = 2'-fluoro modification
  modified_base 30: mod_base = OTHER; note = 2'-O-methyl nucleotide
  modified_base 32: mod_base = OTHER; note = 2'-O-methyl nucleotide
  modified_base 33: mod_base = OTHER; note = 2'-O-methyl nucleotide
  modified_base 34: mod_base = OTHER; note = 2'-O-methyl nucleotide
  modified_base 35: mod_base = OTHER; note = 2'-O-methyl nucleotide
  modified_base 36: mod_base = OTHER; note = 2'-O-methyl nucleotide
  modified_base 37: mod_base = OTHER; note = 2'-O-methyl nucleotide
  modified_base 40: mod_base = OTHER; note = 2'-O-methyl nucleotide
  modified_base 41: mod_base = OTHER; note = 2'-O-methyl nucleotide
  modified_base 44: mod_base = OTHER; note = 2'-fluoro modification
  modified_base 46: mod_base = OTHER; note = 2'-O-methyl nucleotide
  modified_base 47: mod_base = OTHER; note = 2'-O-methyl nucleotide
  modified_base 49: mod_base = OTHER; note = 2'-O-methyl nucleotide
  modified_base 50: mod_base = OTHER; note = 2'-O-methyl nucleotide
  modified_base 51: mod_base = OTHER; note = 2'-O-methyl nucleotide
  modified_base 52: mod_base = OTHER; note = 2'-O-methyl nucleotide
  modified_base 53: mod_base = OTHER; note = 2'-O-methyl nucleotide
  modified_base 54: mod_base = OTHER; note = 2'-O-methyl nucleotide
  modified_base 55: mod_base = OTHER; note = 2'-O-methyl nucleotide
  modified_base 56: mod_base = OTHER; note = 2'-O-methyl nucleotide
  modified_base 57: mod_base = OTHER; note = 2'-O-methyl nucleotide
  modified_base 58: mod_base = OTHER; note = 2'-O-methyl nucleotide
  modified_base 59: mod_base = OTHER; note = 2'-O-methyl nucleotide
  modified_base 60: mod_base = OTHER; note = 2'-O-methyl nucleotide
  modified_base 61: mod_base = OTHER; note = 2'-O-methyl nucleotide
  modified_base 62: mod_base = OTHER; note = 2'-O-methyl nucleotide
  modified_base 63: mod_base = OTHER; note = 2'-O-methyl nucleotide
  modified_base 64: mod_base = OTHER; note = 2'-O-methyl nucleotide
  modified_base 65: mod_base = OTHER; note = 2'-O-methyl nucleotide
  modified_base 66: mod_base = OTHER; note = 2'-O-methyl nucleotide
  modified_base 67: mod_base = OTHER; note = 2'-O-methyl nucleotide
  modified_base 68: mod_base = OTHER; note = 2'-O-methyl nucleotide, phosphorothioate linkage
  modified_base 69: mod_base = OTHER; note = 2'-O-methyl nucleotide, phosphorothioate linkage
  modified_base 70: mod_base = OTHER; note = 2'-O-methyl nucleotide, phosphorothioate linkage
  modified_base 71: mod_base = OTHER; note = 2'-O-methyl nucleotide
  source 1..71: mol_type = other RNA

SEQ ID NO: 641 - RNA, 71 nt, synthetic construct; identical to SEQ ID NO: 607
  misc_feature 1..71: note = Synthetic
  modified_base 9: mod_base = OTHER; note = 2'-O-methyl nucleotide
  modified_base 10: mod_base = OTHER; note = 2'-O-methyl nucleotide
  modified_base 11: mod_base = OTHER; note = 2'-O-methyl nucleotide
  modified_base 12: mod_base = OTHER; note = 2'-O-methyl nucleotide
  modified_base 13: mod_base = OTHER; note = 2'-O-methyl nucleotide
  modified_base 14: mod_base = OTHER; note = 2'-O-methyl nucleotide
  modified_base 15: mod_base = OTHER; note = 2'-O-methyl nucleotide
  modified_base 16: mod_base = OTHER; note = 2'-O-methyl nucleotide
  modified_base 17: mod_base = OTHER; note = 2'-O-methyl nucleotide
  modified_base 18: mod_base = OTHER; note = 2'-O-methyl nucleotide
  modified_base 19: mod_base = OTHER; note = 2'-O-methyl nucleotide
  modified_base 20: mod_base = OTHER; note = 2'-O-methyl nucleotide
  modified_base 68: mod_base = OTHER; note = 2'-O-methyl nucleotide, phosphorothioate linkage
  modified_base 69: mod_base = OTHER; note = 2'-O-methyl nucleotide, phosphorothioate linkage
  modified_base 70: mod_base = OTHER; note = 2'-O-methyl nucleotide, phosphorothioate linkage
  modified_base 71: mod_base = OTHER; note = 2'-O-methyl nucleotide
  source 1..71: mol_type = other RNA

SEQ ID NO: 642-657 - skipped (16 entries)

SEQ ID NO: 658 - RNA, 100 nt, synthetic construct; identical to SEQ ID NO: 610
  misc_feature 1..100: note = Synthetic
  variation 1..20: note = n is a, c, g, or u
  modified_base 1: mod_base = OTHER; note = 2'-O-methyl nucleotide, phosphorothioate linkage
  modified_base 2: mod_base = OTHER; note = 2'-O-methyl nucleotide, phosphorothioate linkage
  modified_base 3: mod_base = OTHER; note = 2'-O-methyl nucleotide, phosphorothioate linkage
  modified_base 29: mod_base = OTHER; note = 2'-O-methyl nucleotide
  modified_base 30: mod_base = OTHER; note = 2'-O-methyl nucleotide
  modified_base 31: mod_base = OTHER; note = 2'-O-methyl nucleotide
  modified_base 32: mod_base = OTHER; note = 2'-O-methyl nucleotide
  modified_base 33: mod_base = OTHER; note = 2'-O-methyl nucleotide
  modified_base 34: mod_base = OTHER; note = 2'-O-methyl nucleotide
  modified_base 35: mod_base = OTHER; note = 2'-O-methyl nucleotide
  modified_base 36: mod_base = OTHER; note = 2'-O-methyl nucleotide
  modified_base 37: mod_base = OTHER; note = 2'-O-methyl nucleotide
  modified_base 38: mod_base = OTHER; note = 2'-O-methyl nucleotide
  modified_base 39: mod_base = OTHER; note = 2'-O-methyl nucleotide
  modified_base 40: mod_base = OTHER; note = 2'-O-methyl nucleotide
  modified_base 69: mod_base = OTHER; note = 2'-O-methyl nucleotide
  modified_base 70: mod_base = OTHER; note = 2'-O-methyl nucleotide
  modified_base 71: mod_base = OTHER; note = 2'-O-methyl nucleotide
  modified_base 72: mod_base = OTHER; note = 2'-O-methyl nucleotide
  modified_base 73: mod_base = OTHER; note = 2'-O-methyl nucleotide
  modified_base 74: mod_base = OTHER; note = 2'-O-methyl nucleotide
  modified_base 75: mod_base = OTHER; note = 2'-O-methyl nucleotide
  modified_base 76: mod_base = OTHER; note = 2'-O-methyl nucleotide
  modified_base 77: mod_base = OTHER; note = 2'-O-methyl nucleotide
  modified_base 78: mod_base = OTHER; note = 2'-O-methyl nucleotide
  modified_base 79: mod_base = OTHER; note = 2'-O-methyl nucleotide
  modified_base 80: mod_base = OTHER; note = 2'-O-methyl nucleotide
  modified_base 81: mod_base = OTHER; note = 2'-O-methyl nucleotide
  modified_base 82: mod_base = OTHER; note = 2'-O-methyl nucleotide
  modified_base 83: mod_base = OTHER; note = 2'-O-methyl nucleotide
  modified_base 84: mod_base = OTHER; note = 2'-O-methyl nucleotide
  modified_base 85: mod_base = OTHER; note = 2'-O-methyl nucleotide
  modified_base 86: mod_base = OTHER; note = 2'-O-methyl nucleotide
  modified_base 87: mod_base = OTHER; note = 2'-O-methyl nucleotide
  modified_base 88: mod_base = OTHER; note = 2'-O-methyl nucleotide
  modified_base 89: mod_base = OTHER; note = 2'-O-methyl nucleotide
  modified_base 90: mod_base = OTHER; note = 2'-O-methyl nucleotide
  modified_base 91: mod_base = OTHER; note = 2'-O-methyl nucleotide
  modified_base 92: mod_base = OTHER; note = 2'-O-methyl nucleotide
  modified_base 93: mod_base = OTHER; note = 2'-O-methyl nucleotide
  modified_base 94: mod_base = OTHER; note = 2'-O-methyl nucleotide
  modified_base 95: mod_base = OTHER; note = 2'-O-methyl nucleotide
  modified_base 96: mod_base = OTHER; note = 2'-O-methyl nucleotide
  modified_base 97: mod_base = OTHER; note = 2'-O-methyl nucleotide, phosphorothioate linkage
  modified_base 98: mod_base = OTHER; note = 2'-O-methyl nucleotide, phosphorothioate linkage
  modified_base 99: mod_base = OTHER; note = 2'-O-methyl nucleotide, phosphorothioate linkage
  modified_base 100: mod_base = OTHER; note = 2'-O-methyl nucleotide
  source 1..100: mol_type = other RNA

SEQ ID NO: 659 - RNA, 96 nt, synthetic construct; identical to SEQ ID NO: 611
  misc_feature 1..96: note = Synthetic
  variation 1..20: note = n is a, c, g, or u
  modified_base 1: mod_base = OTHER; note = 2'-O-methyl nucleotide, phosphorothioate linkage
  modified_base 2: mod_base = OTHER; note = 2'-O-methyl nucleotide, phosphorothioate linkage
  modified_base 3: mod_base = OTHER; note = 2'-O-methyl nucleotide, phosphorothioate linkage
  modified_base 29: mod_base = OTHER; note = 2'-O-methyl nucleotide
  modified_base 30: mod_base = OTHER; note = 2'-O-methyl nucleotide
  modified_base 31: mod_base = OTHER; note = 2'-O-methyl nucleotide
  modified_base 32: mod_base = OTHER; note = 2'-O-methyl nucleotide
  modified_base 33: mod_base = OTHER; note = 2'-O-methyl nucleotide
  modified_base 34: mod_base = OTHER; note = 2'-O-methyl nucleotide
  modified_base 35: mod_base = OTHER; note = 2'-O-methyl nucleotide
  modified_base 36: mod_base = OTHER; note = 2'-O-methyl nucleotide
  modified_base 37: mod_base = OTHER; note = 2'-O-methyl nucleotide
  modified_base 38: mod_base = OTHER; note = 2'-O-methyl nucleotide
  modified_base 39: mod_base = OTHER; note = 2'-O-methyl nucleotide
  modified_base 40: mod_base = OTHER; note = 2'-O-methyl nucleotide
  modified_base 69: mod_base = OTHER; note = 2'-O-methyl nucleotide
  modified_base 70: mod_base = OTHER; note = 2'-O-methyl nucleotide
  modified_base 71: mod_base = OTHER; note = 2'-O-methyl nucleotide
  modified_base 72: mod_base = OTHER; note = 2'-O-methyl nucleotide
  modified_base 73: mod_base = OTHER; note = 2'-O-methyl nucleotide
  modified_base 74: mod_base = OTHER; note = 2'-O-methyl nucleotide
  modified_base 75: mod_base = OTHER; note = 2'-O-methyl nucleotide
  modified_base 76: mod_base = OTHER; note = 2'-O-methyl nucleotide
  modified_base 77: mod_base = OTHER; note = 2'-O-methyl nucleotide
  modified_base 78: mod_base = OTHER; note = 2'-O-methyl nucleotide
  modified_base 79: mod_base = OTHER; note = 2'-O-methyl nucleotide
  modified_base 80: mod_base = OTHER; note = 2'-O-methyl nucleotide
  modified_base 81: mod_base = OTHER; note = 2'-O-methyl nucleotide
  modified_base 82: mod_base = OTHER; note = 2'-O-methyl nucleotide
  modified_base 83: mod_base = OTHER; note = 2'-O-methyl nucleotide
  modified_base 84: mod_base = OTHER; note = 2'-O-methyl nucleotide
  modified_base 85: mod_base = OTHER; note = 2'-O-methyl nucleotide
  modified_base 86: mod_base = OTHER; note = 2'-O-methyl nucleotide
  modified_base 87: mod_base = OTHER; note = 2'-O-methyl nucleotide
  modified_base 88: mod_base = OTHER; note = 2'-O-methyl nucleotide
  modified_base 89: mod_base = OTHER; note = 2'-O-methyl nucleotide
  modified_base 90: mod_base = OTHER; note = 2'-O-methyl nucleotide
  modified_base 91: mod_base = OTHER; note = 2'-O-methyl nucleotide
  modified_base 92: mod_base = OTHER; note = 2'-O-methyl nucleotide
  modified_base 93: mod_base = OTHER; note = 2'-O-methyl nucleotide
  modified_base 94: mod_base = OTHER; note = 2'-O-methyl nucleotide
  modified_base 95: mod_base = OTHER; note = 2'-O-methyl nucleotide
  modified_base 96: mod_base = OTHER; note = 2'-O-methyl nucleotide
  source 1..96: mol_type = other RNA

SEQ ID NO: 660 - RNA, 97 nt, synthetic construct; identical to SEQ ID NO: 612
  misc_feature 1..97: note = Synthetic
  variation 1..20: note = n is a, c, g, or u
  modified_base 1: mod_base = OTHER; note = 2'-O-methyl nucleotide, phosphorothioate linkage
  modified_base 2: mod_base = OTHER; note = 2'-O-methyl nucleotide, phosphorothioate linkage
  modified_base 3: mod_base = OTHER; note = 2'-O-methyl nucleotide, phosphorothioate linkage
  modified_base 29: mod_base = OTHER; note = 2'-O-methyl nucleotide
  modified_base 30: mod_base = OTHER; note = 2'-O-methyl nucleotide
  modified_base 31: mod_base = OTHER; note = 2'-O-methyl nucleotide
  modified_base 32: mod_base = OTHER; note = 2'-O-methyl nucleotide
  modified_base 33: mod_base = OTHER; note = 2'-O-methyl nucleotide
  modified_base 34: mod_base = OTHER; note = 2'-O-methyl nucleotide
  modified_base 35: mod_base = OTHER; note = 2'-O-methyl nucleotide
  modified_base 36: mod_base = OTHER; note = 2'-O-methyl nucleotide
  modified_base 37: mod_base = OTHER; note = 2'-O-methyl nucleotide
  modified_base 38: mod_base = OTHER; note = 2'-O-methyl nucleotide
  modified_base 39: mod_base = OTHER; note = 2'-O-methyl nucleotide
  modified_base 40: mod_base = OTHER; note = 2'-O-methyl nucleotide
  modified_base 69: mod_base = OTHER; note = 2'-O-methyl nucleotide
  modified_base 70: mod_base = OTHER; note = 2'-O-methyl nucleotide
  modified_base 71: mod_base = OTHER; note = 2'-O-methyl nucleotide
  modified_base 72: mod_base = OTHER; note = 2'-O-methyl nucleotide
  modified_base 73: mod_base = OTHER; note = 2'-O-methyl nucleotide
  modified_base 74: mod_base = OTHER; note = 2'-O-methyl nucleotide
  modified_base 75: mod_base = OTHER; note = 2'-O-methyl nucleotide
  modified_base 76: mod_base = OTHER; note = 2'-O-methyl nucleotide
  modified_base 77: mod_base = OTHER; note = 2'-O-methyl nucleotide
  modified_base 78: mod_base = OTHER; note = 2'-O-methyl nucleotide
  modified_base 79: mod_base = OTHER; note = 2'-O-methyl nucleotide
  modified_base 80: mod_base = OTHER; note = 2'-O-methyl nucleotide
  modified_base 81: mod_base = OTHER; note = 2'-O-methyl nucleotide
  modified_base 82: mod_base = OTHER; note = 2'-O-methyl nucleotide
  modified_base 83: mod_base = OTHER; note = 2'-O-methyl nucleotide
  modified_base 84: mod_base = OTHER; note = 2'-O-methyl nucleotide
  modified_base 85: mod_base = OTHER; note = 2'-O-methyl nucleotide
  modified_base 86: mod_base = OTHER; note = 2'-O-methyl nucleotide
  modified_base 87: mod_base = OTHER; note = 2'-O-methyl nucleotide
  modified_base 88: mod_base = OTHER; note = 2'-O-methyl nucleotide
  modified_base 89: mod_base = OTHER; note = 2'-O-methyl nucleotide
  modified_base 90: mod_base = OTHER; note = 2'-O-methyl nucleotide
  modified_base 91: mod_base = OTHER; note = 2'-O-methyl nucleotide
  modified_base 92: mod_base = OTHER; note = 2'-O-methyl nucleotide
  modified_base 93: mod_base = OTHER; note = 2'-O-methyl nucleotide
  modified_base 94: mod_base = OTHER; note = 2'-O-methyl nucleotide
  modified_base 95: mod_base = OTHER; note = 2'-O-methyl nucleotide
  modified_base 96: mod_base = OTHER; note = 2'-O-methyl nucleotide
  modified_base 97: mod_base = OTHER; note = 2'-O-methyl nucleotide
  source 1..97: mol_type = other RNA

SEQ ID NO: 661 - RNA, 88 nt, synthetic construct; identical to SEQ ID NO: 613
  misc_feature 1..88: note = Synthetic
  variation 1..20: note = n is a, c, g, or u
  modified_base 1: mod_base = OTHER; note = 2'-O-methyl nucleotide, phosphorothioate linkage
  modified_base 2: mod_base = OTHER; note = 2'-O-methyl nucleotide, phosphorothioate linkage
  modified_base 3: mod_base = OTHER; note = 2'-O-methyl nucleotide, phosphorothioate linkage
  modified_base 29: mod_base = OTHER; note = 2'-O-methyl nucleotide
  modified_base 30: mod_base = OTHER; note = 2'-O-methyl nucleotide
  modified_base 31: mod_base = OTHER; note = 2'-O-methyl nucleotide
  modified_base 32: mod_base = OTHER; note = 2'-O-methyl nucleotide
  modified_base 33: mod_base = OTHER; note = 2'-O-methyl nucleotide
  modified_base 34: mod_base = OTHER; note = 2'-O-methyl nucleotide
  modified_base 35: mod_base = OTHER; note = 2'-O-methyl nucleotide
  modified_base 36: mod_base = OTHER; note = 2'-O-methyl nucleotide
  modified_base 37: mod_base = OTHER; note = 2'-O-methyl nucleotide
  modified_base 38: mod_base = OTHER; note = 2'-O-methyl nucleotide
  modified_base 39: mod_base = OTHER; note = 2'-O-methyl nucleotide
  modified_base 40: mod_base = OTHER; note = 2'-O-methyl nucleotide
  modified_base 85: mod_base = OTHER; note = phosphorothioate linkage
  modified_base 86: mod_base = OTHER; note = 2'-O-methyl nucleotide, phosphorothioate linkage
  modified_base 87: mod_base = OTHER; note = 2'-O-methyl nucleotide, phosphorothioate linkage
  modified_base 88: mod_base = OTHER; note = 2'-O-methyl nucleotide
  source 1..88: mol_type = other RNA

SEQ ID NO: 662 - RNA, 88 nt, synthetic construct; identical to SEQ ID NO: 614
  misc_feature 1..88: note = Synthetic
  variation 1..20: note = n is a, c, g, or u
  modified_base 1: mod_base = OTHER; note = 2'-O-methyl nucleotide, phosphorothioate linkage
  modified_base 2: mod_base = OTHER; note = 2'-O-methyl nucleotide, phosphorothioate linkage
  modified_base 3: mod_base = OTHER; note = 2'-O-methyl nucleotide, phosphorothioate linkage
  modified_base 29: mod_base = OTHER; note = 2'-O-methyl nucleotide
  modified_base 30: mod_base = OTHER; note = 2'-O-methyl nucleotide
  modified_base 31: mod_base = OTHER; note = 2'-O-methyl nucleotide
  modified_base 32: mod_base = OTHER; note = 2'-O-methyl nucleotide
  modified_base 33: mod_base = OTHER; note = 2'-O-methyl nucleotide
  modified_base 34: mod_base = OTHER; note = 2'-O-methyl nucleotide
  modified_base 35: mod_base = OTHER; note = 2'-O-methyl nucleotide
  modified_base 36: mod_base = OTHER; note = 2'-O-methyl nucleotide
  modified_base 37: mod_base = OTHER; note = 2'-O-methyl nucleotide
  modified_base 38: mod_base = OTHER; note = 2'-O-methyl nucleotide
  modified_base 39: mod_base = OTHER; note = 2'-O-methyl nucleotide
  modified_base 40: mod_base = OTHER; note = 2'-O-methyl nucleotide
  modified_base 85: mod_base = OTHER; note = phosphorothioate linkage
  modified_base 86: mod_base = OTHER; note = 2'-O-methyl nucleotide, phosphorothioate linkage
  modified_base 87: mod_base = OTHER; note = 2'-O-methyl nucleotide, phosphorothioate linkage
  modified_base 88: mod_base = OTHER; note = 2'-O-methyl nucleotide
  source 1..88: mol_type = other RNA

SEQ ID NO: 663 - RNA, 88 nt, synthetic construct; identical to SEQ ID NO: 614
  misc_feature 1..88: note = Synthetic
  variation 1..20: note = n is a, c, g, or u
  modified_base 1: mod_base = OTHER; note = 2'-O-methyl nucleotide, phosphorothioate linkage
  modified_base 2: mod_base = OTHER; note = 2'-O-methyl nucleotide, phosphorothioate linkage
  modified_base 3: mod_base = OTHER; note = 2'-O-methyl nucleotide, phosphorothioate linkage
  modified_base 29: mod_base = OTHER; note = 2'-O-methyl nucleotide
  modified_base 30: mod_base = OTHER; note = 2'-O-methyl nucleotide
  modified_base 31: mod_base = OTHER; note = 2'-O-methyl nucleotide
  modified_base 32: mod_base = OTHER; note = 2'-O-methyl nucleotide
  modified_base 33: mod_base = OTHER; note = 2'-O-methyl nucleotide
  modified_base 34: mod_base = OTHER; note = 2'-O-methyl nucleotide
  modified_base 35: mod_base = OTHER; note = 2'-O-methyl nucleotide
  modified_base 36: mod_base = OTHER; note = 2'-O-methyl nucleotide
  modified_base 37: mod_base = OTHER; note = 2'-O-methyl nucleotide
  modified_base 38: mod_base = OTHER; note = 2'-O-methyl nucleotide
  modified_base 39: mod_base = OTHER; note = 2'-O-methyl nucleotide
  modified_base 40: mod_base = OTHER; note = 2'-O-methyl nucleotide
  modified_base 69: mod_base = OTHER; note = 2'-O-methyl nucleotide
  modified_base 70: mod_base = OTHER; note = 2'-O-methyl nucleotide
  modified_base 71: mod_base = OTHER; note = 2'-O-methyl nucleotide
  modified_base 72: mod_base = OTHER; note = 2'-O-methyl nucleotide
  modified_base 73: mod_base = OTHER; note = 2'-O-methyl nucleotide
  modified_base 74: mod_base = OTHER; note = 2'-O-methyl nucleotide
  modified_base 75: mod_base = OTHER; note = 2'-O-methyl nucleotide
  modified_base 76: mod_base = OTHER; note = 2'-O-methyl nucleotide
  modified_base 77: mod_base = OTHER; note = 2'-O-methyl nucleotide
  modified_base 78: mod_base = OTHER; note = 2'-O-methyl nucleotide
  modified_base 79: mod_base = OTHER; note = 2'-O-methyl nucleotide
  modified_base 80: mod_base = OTHER; note = 2'-O-methyl nucleotide
  modified_base 81: mod_base = OTHER; note = 2'-O-methyl nucleotide
  modified_base 82: mod_base = OTHER; note = 2'-O-methyl nucleotide
  modified_base 83: mod_base = OTHER; note = 2'-O-methyl nucleotide
  modified_base 84: mod_base = OTHER; note = 2'-O-methyl nucleotide
  modified_base 85: mod_base = OTHER; note = 2'-O-methyl nucleotide, phosphorothioate linkage
  modified_base 86: mod_base = OTHER; note = 2'-O-methyl nucleotide, phosphorothioate linkage
  modified_base 87: mod_base = OTHER; note = 2'-O-methyl nucleotide, phosphorothioate linkage
  modified_base 88: mod_base = OTHER; note = 2'-O-methyl nucleotide
  source 1..88: mol_type = other RNA

SEQ ID NO: 664 - RNA, 90 nt, synthetic construct; identical to SEQ ID NO: 616
  misc_feature 1..90: note = Synthetic
  variation 1..20: note = n is a, c, g, or u
  modified_base 1: mod_base = OTHER; note = 2'-O-methyl nucleotide, phosphorothioate linkage
  modified_base 2: mod_base = OTHER; note = 2'-O-methyl nucleotide, phosphorothioate linkage
  modified_base 3: mod_base = OTHER; note = 2'-O-methyl nucleotide, phosphorothioate linkage
  modified_base 29: mod_base = OTHER; note = 2'-O-methyl nucleotide
  modified_base 30: mod_base = OTHER; note = 2'-O-methyl nucleotide
  modified_base 31: mod_base = OTHER; note = 2'-O-methyl nucleotide
  modified_base 32: mod_base = OTHER; note = 2'-O-methyl nucleotide
  modified_base 33: mod_base = OTHER; note = 2'-O-methyl nucleotide
  modified_base 34: mod_base = OTHER; note = 2'-O-methyl nucleotide
  modified_base 35: mod_base = OTHER; note = 2'-O-methyl nucleotide
  modified_base 36: mod_base = OTHER; note = 2'-O-methyl nucleotide
  modified_base 37: mod_base = OTHER; note = 2'-O-methyl nucleotide
  modified_base 38: mod_base = OTHER; note = 2'-O-methyl nucleotide
  modified_base 39: mod_base = OTHER; note = 2'-O-methyl nucleotide
  modified_base 40: mod_base = OTHER; note = 2'-O-methyl nucleotide
  modified_base 87: mod_base = OTHER; note = phosphorothioate linkage
  modified_base 88: mod_base = OTHER; note = 2'-O-methyl nucleotide, phosphorothioate linkage
  modified_base 89: mod_base = OTHER; note = 2'-O-methyl nucleotide, phosphorothioate linkage
  modified_base 90: mod_base = OTHER; note = 2'-O-methyl nucleotide
  source 1..90: mol_type = other RNA

SEQ ID NO: 665 - RNA, 90 nt, synthetic construct; identical to SEQ ID NO: 616
  misc_feature 1..90: note = Synthetic
  variation 1..20: note = n is a, c, g, or u
  modified_base 1: mod_base = OTHER; note = 2'-O-methyl nucleotide, phosphorothioate linkage
  modified_base 2: mod_base = OTHER; note = 2'-O-methyl nucleotide, phosphorothioate linkage
  modified_base 3: mod_base = OTHER; note = 2'-O-methyl nucleotide, phosphorothioate linkage
  modified_base 29: mod_base = OTHER; note = 2'-O-methyl nucleotide
  modified_base 30: mod_base = OTHER; note = 2'-O-methyl nucleotide
  modified_base 31: mod_base = OTHER; note = 2'-O-methyl nucleotide
  modified_base 32: mod_base = OTHER; note = 2'-O-methyl nucleotide
  modified_base 33: mod_base = OTHER; note = 2'-O-methyl nucleotide
  modified_base 34: mod_base = OTHER; note = 2'-O-methyl nucleotide
  modified_base 35: mod_base = OTHER; note = 2'-O-methyl nucleotide
  modified_base 36: mod_base = OTHER; note = 2'-O-methyl nucleotide
  modified_base 37: mod_base = OTHER; note = 2'-O-methyl nucleotide
  modified_base 38: mod_base = OTHER; note = 2'-O-methyl nucleotide
  modified_base 39: mod_base = OTHER; note = 2'-O-methyl nucleotide
  modified_base 40: mod_base = OTHER; note = 2'-O-methyl nucleotide
  modified_base 69: mod_base = OTHER; note = 2'-O-methyl nucleotide
  modified_base 70: mod_base = OTHER; note = 2'-O-methyl nucleotide
  modified_base 71: mod_base = OTHER; note = 2'-O-methyl nucleotide
  modified_base 72: mod_base = OTHER; note = 2'-O-methyl nucleotide
  modified_base 73: mod_base = OTHER; note = 2'-O-methyl nucleotide
  modified_base 74: mod_base = OTHER; note = 2'-O-methyl nucleotide
  modified_base 75: mod_base = OTHER; note = 2'-O-methyl nucleotide
  modified_base 76: mod_base = OTHER; note = 2'-O-methyl nucleotide
  modified_base 77: mod_base = OTHER; note = 2'-O-methyl nucleotide
  modified_base 78: mod_base = OTHER; note = 2'-O-methyl nucleotide
  modified_base 79: mod_base = OTHER; note = 2'-O-methyl nucleotide
  modified_base 80: mod_base = OTHER; note = 2'-O-methyl nucleotide
  modified_base 81: mod_base = OTHER; note = 2'-O-methyl nucleotide
  modified_base 82: mod_base = OTHER; note = 2'-O-methyl nucleotide
  modified_base 83: mod_base = OTHER; note = 2'-O-methyl nucleotide
  modified_base 84: mod_base = OTHER; note = 2'-O-methyl nucleotide
  modified_base 85: mod_base = OTHER; note = 2'-O-methyl nucleotide
  modified_base 86: mod_base = OTHER; note = 2'-O-methyl nucleotide
  modified_base 87: mod_base = OTHER; note = 2'-O-methyl nucleotide, phosphorothioate linkage
  modified_base 88: mod_base = OTHER; note = 2'-O-methyl nucleotide, phosphorothioate linkage
  modified_base 89: mod_base = OTHER; note = 2'-O-methyl nucleotide, phosphorothioate linkage
  modified_base 90: mod_base = OTHER; note = 2'-O-methyl nucleotide
  source 1..90: mol_type = other RNA

SEQ ID NO: 666 - RNA, 91 nt, synthetic construct; identical to SEQ ID NO: 617
  misc_feature 1..91: note = Synthetic
  variation 1..20: note = n is a, c, g, or u
  modified_base 1: mod_base = OTHER; note = 2'-O-methyl nucleotide, phosphorothioate linkage
  modified_base 2: mod_base = OTHER; note = 2'-O-methyl nucleotide, phosphorothioate linkage
  modified_base 3: mod_base = OTHER; note = 2'-O-methyl nucleotide, phosphorothioate linkage
  modified_base 29: mod_base = OTHER; note = 2'-O-methyl nucleotide
  modified_base 30: mod_base = OTHER; note = 2'-O-methyl nucleotide
  modified_base 31: mod_base = OTHER; note = 2'-O-methyl nucleotide
  modified_base 32: mod_base = OTHER; note = 2'-O-methyl nucleotide
  modified_base 33: mod_base = OTHER; note = 2'-O-methyl nucleotide
  modified_base 34: mod_base = OTHER; note = 2'-O-methyl nucleotide
  modified_base 35: mod_base = OTHER; note = 2'-O-methyl nucleotide
  modified_base 36: mod_base = OTHER; note = 2'-O-methyl nucleotide
  modified_base 37: mod_base = OTHER; note = 2'-O-methyl nucleotide
  modified_base 38: mod_base = OTHER; note = 2'-O-methyl nucleotide
  modified_base 39: mod_base = OTHER; note = 2'-O-methyl nucleotide
  modified_base 40: mod_base = OTHER; note = 2'-O-methyl nucleotide
  modified_base 88: mod_base = OTHER; note = phosphorothioate linkage
  modified_base 89: mod_base = OTHER; note = 2'-O-methyl nucleotide, phosphorothioate linkage
  modified_base 90: mod_base = OTHER; note = 2'-O-methyl nucleotide, phosphorothioate linkage
  modified_base 91: mod_base = OTHER; note = 2'-O-methyl nucleotide
  source 1..91: mol_type = other RNA

SEQ ID NO: 667 - RNA, 91 nt, synthetic construct; identical to SEQ ID NO: 617
  misc_feature 1..91: note = Synthetic
  variation 1..20: note = n is a, c, g, or u
  modified_base 1: mod_base = OTHER; note = 2'-O-methyl nucleotide, phosphorothioate linkage
  modified_base 2: mod_base = OTHER; note = 2'-O-methyl nucleotide, phosphorothioate linkage
  modified_base 3: mod_base = OTHER; note = 2'-O-methyl nucleotide, phosphorothioate linkage
  modified_base 29: mod_base = OTHER; note = 2'-O-methyl nucleotide
  modified_base 30: mod_base = OTHER; note = 2'-O-methyl nucleotide
  modified_base 31: mod_base = OTHER; note = 2'-O-methyl nucleotide
  modified_base 32: mod_base = OTHER; note = 2'-O-methyl nucleotide
  modified_base 33: mod_base = OTHER; note = 2'-O-methyl nucleotide
  modified_base 34: mod_base = OTHER; note = 2'-O-methyl nucleotide
  modified_base 35: mod_base = OTHER; note = 2'-O-methyl nucleotide
  modified_base 36: mod_base = OTHER; note = 2'-O-methyl nucleotide
  modified_base 37: mod_base = OTHER; note = 2'-O-methyl nucleotide
  modified_base 38: mod_base = OTHER; note = 2'-O-methyl nucleotide
  modified_base 39: mod_base = OTHER; note = 2'-O-methyl nucleotide
  modified_base 40: mod_base = OTHER; note = 2'-O-methyl nucleotide
  modified_base 88: mod_base = OTHER; note = 2'-O-methyl nucleotide
  modified_base 89: mod_base = OTHER; note = 2'-O-methyl nucleotide
  modified_base 90: mod_base = OTHER; note = 2'-O-methyl nucleotide, phosphorothioate linkage
  modified_base 91: mod_base = OTHER; note = 2'-O-methyl nucleotide
  source 1..91: mol_type = other RNA

SEQ ID NO: 668 - RNA, 91 nt, synthetic construct; identical to SEQ ID NO: 617
  misc_feature 1..91: note = Synthetic
  variation 1..20: note = n is a, c, g, or u
  modified_base 1: mod_base = OTHER; note = 2'-O-methyl nucleotide, phosphorothioate linkage
  modified_base 2: mod_base = OTHER; note = 2'-O-methyl nucleotide, phosphorothioate linkage
  modified_base 3: mod_base = OTHER; note = 2'-O-methyl nucleotide, phosphorothioate linkage
  modified_base 25: mod_base = OTHER; note = 2'-fluoro modification
  modified_base 28: mod_base = OTHER; note = 2'-O-methyl nucleotide
  modified_base 29: mod_base = OTHER; note = 2'-O-methyl nucleotide
  modified_base 30: mod_base = OTHER; note = 2'-O-methyl nucleotide
  modified_base 31: mod_base = OTHER; note = 2'-O-methyl nucleotide
  modified_base 32: mod_base = OTHER; note = 2'-O-methyl nucleotide
  modified_base 33: mod_base = OTHER; note = 2'-O-methyl nucleotide
  modified_base 34: mod_base = OTHER; note = 2'-O-methyl nucleotide
  modified_base 35: mod_base = OTHER; note = 2'-O-methyl nucleotide
  modified_base 36: mod_base = OTHER; note = 2'-O-methyl nucleotide
  modified_base 37: mod_base = OTHER; note = 2'-O-methyl nucleotide
  modified_base 38: mod_base = OTHER; note = 2'-O-methyl nucleotide
  modified_base 39: mod_base = OTHER; note = 2'-O-methyl nucleotide
  modified_base 40: mod_base = OTHER; note = 2'-O-methyl nucleotide
  modified_base 41: mod_base = OTHER; note = 2'-O-methyl nucleotide
  modified_base 42: mod_base = OTHER; note = 2'-O-methyl nucleotide
  modified_base 45: mod_base = OTHER; note = 2'-fluoro modification
  modified_base 46: mod_base = OTHER; note = 2'-O-methyl nucleotide
  modified_base 47: mod_base = OTHER; note = 2'-fluoro modification
  modified_base 48: mod_base = OTHER; note = 2'-O-methyl nucleotide
  modified_base 49: mod_base = OTHER; note = 2'-fluoro modification
  modified_base 50: mod_base = OTHER; note = 2'-O-methyl nucleotide
  modified_base 52: mod_base = OTHER; note = 2'-O-methyl nucleotide
  modified_base 53: mod_base = OTHER; note = 2'-O-methyl nucleotide
  modified_base 54: mod_base = OTHER; note = 2'-O-methyl nucleotide
  modified_base 55: mod_base = OTHER; note = 2'-O-methyl nucleotide
  modified_base 56: mod_base = OTHER; note = 2'-O-methyl nucleotide
  modified_base 57: mod_base = OTHER; note = 2'-O-methyl nucleotide
  modified_base 60: mod_base = OTHER; note = 2'-O-methyl nucleotide
  modified_base 61: mod_base = OTHER; note = 2'-O-methyl nucleotide
  modified_base 64: mod_base = OTHER; note = 2'-fluoro modification
  modified_base 66: mod_base = OTHER; note = 2'-O-methyl nucleotide
  modified_base 67: mod_base = OTHER; note = 2'-O-methyl nucleotide
  modified_base 69: mod_base = OTHER; note = 2'-O-methyl nucleotide
  modified_base 70: mod_base = OTHER; note = 2'-O-methyl nucleotide
  modified_base 71: mod_base = OTHER; note = 2'-O-methyl nucleotide
  modified_base 72: mod_base = OTHER; note = 2'-O-methyl nucleotide
  modified_base 73: mod_base = OTHER; note = 2'-O-methyl nucleotide
  modified_base 74: mod_base = OTHER; note = 2'-O-methyl nucleotide
  modified_base 75: mod_base = OTHER; note = 2'-O-methyl nucleotide
  modified_base 76: mod_base = OTHER; note = 2'-O-methyl nucleotide
  modified_base 77: mod_base = OTHER; note = 2'-O-methyl nucleotide
  modified_base 78: mod_base = OTHER; note = 2'-O-methyl nucleotide
  modified_base 79: mod_base = OTHER; note = 2'-O-methyl nucleotide
  modified_base 80: mod_base = OTHER; note = 2'-O-methyl nucleotide
  modified_base 81: mod_base = OTHER; note = 2'-O-methyl nucleotide
  modified_base 82: mod_base = OTHER; note = 2'-O-methyl nucleotide
  modified_base 83: mod_base = OTHER; note = 2'-O-methyl nucleotide
  modified_base 84: mod_base = OTHER; note = 2'-O-methyl nucleotide
  modified_base 85: mod_base = OTHER; note = 2'-O-methyl nucleotide
  modified_base 86: mod_base = OTHER; note = 2'-O-methyl nucleotide
  modified_base 87: mod_base = OTHER; note = 2'-O-methyl nucleotide
  modified_base 88: mod_base = OTHER; note = 2'-O-methyl nucleotide, phosphorothioate linkage
  modified_base 89: mod_base = OTHER; note = 2'-O-methyl nucleotide, phosphorothioate linkage
  modified_base 90: mod_base = OTHER; note = 2'-O-methyl nucleotide, phosphorothioate linkage
  modified_base 91: mod_base = OTHER; note = 2'-O-methyl nucleotide
  source 1..91: mol_type = other RNA

SEQ ID NO: 669 - RNA, 91 nt, synthetic construct; identical to SEQ ID NO: 617
  misc_feature 1..91: note = Synthetic
  variation 1..20: note = n is a, c, g, or u
  modified_base 1: mod_base = OTHER; note = 2'-O-methyl nucleotide, phosphorothioate linkage
  modified_base 2: mod_base = OTHER; note = 2'-O-methyl nucleotide, phosphorothioate linkage
  modified_base 3: mod_base = OTHER; note = 2'-O-methyl nucleotide, phosphorothioate linkage
  modified_base 29: mod_base = OTHER; note = 2'-O-methyl nucleotide
  modified_base 30: mod_base = OTHER; note = 2'-O-methyl nucleotide
  modified_base 31: mod_base = OTHER; note = 2'-O-methyl nucleotide
  modified_base 32: mod_base = OTHER; note = 2'-O-methyl nucleotide
  modified_base 33: mod_base = OTHER; note = 2'-O-methyl nucleotide
  modified_base 34: mod_base = OTHER; note = 2'-O-methyl nucleotide
  modified_base 35: mod_base = OTHER; note = 2'-O-methyl nucleotide
  modified_base 36: mod_base = OTHER; note = 2'-O-methyl nucleotide
  modified_base 37: mod_base = OTHER; note = 2'-O-methyl nucleotide
  modified_base 38: mod_base = OTHER; note = 2'-O-methyl nucleotide
  modified_base 39: mod_base = OTHER; note = 2'-O-methyl nucleotide
  modified_base 40: mod_base = OTHER; note = 2'-O-methyl nucleotide
  modified_base 88: mod_base = OTHER; note = 2'-O-methyl nucleotide, phosphorothioate linkage
  modified_base 89: mod_base = OTHER; note = 2'-O-methyl nucleotide, phosphorothioate linkage
  modified_base 90: mod_base = OTHER; note = 2'-O-methyl nucleotide, phosphorothioate linkage
  modified_base 91: mod_base = OTHER; note = 2'-O-methyl nucleotide
  source 1..91: mol_type = other RNA

SEQ ID NO: 670 - RNA, 90 nt, synthetic construct
  misc_feature 1..90: note = Synthetic
  variation 1..20: note = n is a, c, g, or u
  misc_feature 32..33: note = site of linker L1
  misc_feature 51..52: note = site of linker L2
  misc_feature 66..67: note = site of linker L1
  source 1..90: mol_type = other RNA
nnnnnnnnnnnnnnnnnnnngttttagagctatagcaagttaaaataaggcgtccgttatcaacttaagtggcaccgagtcggtgctttt

SEQ ID NO: 671 - RNA, 80 nt, synthetic construct
  misc_feature 1..80: note = Synthetic
  variation 1..20: note = n is a, c, g, or u
  misc_feature 32..33: note = site of linker L1
  misc_feature 51..52: note = site of linker L2
  misc_feature 63..64: note = site of linker L1
  source 1..80: mol_type = other RNA
nnnnnnnnnnnnnnnnnnnngttttagagctatagcaagttaaaataaggcgtccgttatcacgggcaccgagtcggtgc

SEQ ID NO: 672 - RNA, 80 nt, synthetic construct; identical to SEQ ID NO: 671
  misc_feature 1..80: note = Synthetic
  variation 1..20: note = n is a, c, g, or u
  modified_base 1: mod_base = OTHER; note = 2'-O-methyl nucleotide, phosphorothioate linkage
  modified_base 2: mod_base = OTHER; note = 2'-O-methyl nucleotide, phosphorothioate linkage
  modified_base 3: mod_base = OTHER; note = 2'-O-methyl nucleotide, phosphorothioate linkage
  modified_base 29: mod_base = OTHER; note = 2'-O-methyl nucleotide
  modified_base 30: mod_base = OTHER; note = 2'-O-methyl nucleotide
  modified_base 31: mod_base = OTHER; note = 2'-O-methyl nucleotide
  modified_base 32: mod_base = OTHER; note = 2'-O-methyl nucleotide
  misc_feature 32..33: note = site of Linker L1
  modified_base 33: mod_base = OTHER; note = 2'-O-methyl nucleotide
  modified_base 34: mod_base = OTHER; note = 2'-O-methyl nucleotide
  modified_base 35: mod_base = OTHER; note = 2'-O-methyl nucleotide
  modified_base 36: mod_base = OTHER; note = 2'-O-methyl nucleotide
  misc_feature 51..52: note = site of Linker L2
  misc_feature 63..64: note = site of Linker L1
  modified_base 77: mod_base = OTHER; note = phosphorothioate linkage
  modified_base 78: mod_base = OTHER; note = 2'-O-methyl nucleotide, phosphorothioate linkage
  modified_base 79: mod_base = OTHER; note = 2'-O-methyl nucleotide, phosphorothioate linkage
  modified_base 80: mod_base = OTHER; note = 2'-O-methyl nucleotide
  source 1..80: mol_type = other RNA

SEQ ID NO: 673 - RNA, 78 nt, synthetic construct
  misc_feature 1..78: note = Synthetic
  variation 1..20: note = n is a, c, g, or u
  modified_base 1: mod_base = OTHER; note = 2'-O-methyl nucleotide, phosphorothioate linkage
  modified_base 2: mod_base = OTHER; note = 2'-O-methyl nucleotide, phosphorothioate linkage
  modified_base 3: mod_base = OTHER; note = 2'-O-methyl nucleotide, phosphorothioate linkage
  modified_base 29: mod_base = OTHER; note = 2'-O-methyl nucleotide
  modified_base 30: mod_base = OTHER; note = 2'-O-methyl nucleotide
  modified_base 31: mod_base = OTHER; note = 2'-O-methyl nucleotide
  modified_base 32: mod_base = OTHER; note = 2'-O-methyl nucleotide
  misc_feature 32..33: note = site of Linker L1
  modified_base 33: mod_base = OTHER; note = 2'-O-methyl nucleotide
  modified_base 34: mod_base = OTHER; note = 2'-O-methyl nucleotide
  modified_base 35: mod_base = OTHER; note = 2'-O-methyl nucleotide
  modified_base 36: mod_base = OTHER; note = 2'-O-methyl nucleotide
  misc_feature 51..52: note = site of Linker L2
  misc_feature 62..63: note = site of Linker L1
  modified_base 75: mod_base = OTHER; note = phosphorothioate linkage
  modified_base 76: mod_base = OTHER; note = 2'-O-methyl nucleotide, phosphorothioate linkage
  modified_base 77: mod_base = OTHER; note = 2'-O-methyl nucleotide, phosphorothioate linkage
  modified_base 78: mod_base = OTHER; note = 2'-O-methyl nucleotide
  source 1..78: mol_type = other RNA
nnnnnnnnnnnnnnnnnnnngttttagagctatagcaagttaaaataaggcgtccgttatcaggcaccgagtcggtgc

SEQ ID NO: 674 - RNA, 78 nt, synthetic construct
  misc_feature 1..78: note = Synthetic
  variation 1..20: note = n is a, c, g, or u
  modified_base 1: mod_base = OTHER; note = 2'-O-methyl nucleotide, phosphorothioate linkage
  modified_base 2: mod_base = OTHER; note = 2'-O-methyl nucleotide, phosphorothioate linkage
  modified_base 3: mod_base = OTHER; note = 2'-O-methyl nucleotide, phosphorothioate linkage
  modified_base 29: mod_base = OTHER; note = 2'-O-methyl nucleotide
  modified_base 30: mod_base = OTHER; note = 2'-O-methyl nucleotide
  modified_base 31: mod_base = OTHER; note = 2'-O-methyl nucleotide
  misc_feature 31..32: note = site of Linker L1
  modified_base 32: mod_base = OTHER; note = 2'-O-methyl nucleotide
  modified_base 33: mod_base = OTHER; note = 2'-O-methyl nucleotide
  modified_base 34: mod_base = OTHER; note = 2'-O-methyl nucleotide
  misc_feature 49..50: note = site of Linker L2
  misc_feature 61..62: note = site of Linker L1
  modified_base 75: mod_base = OTHER; note = phosphorothioate linkage
  modified_base 76: mod_base = OTHER; note = 2'-O-methyl nucleotide, phosphorothioate linkage
  modified_base 77: mod_base = OTHER; note = 2'-O-methyl nucleotide, phosphorothioate linkage
  modified_base 78: mod_base = OTHER; note = 2'-O-methyl nucleotide
  source 1..78: mol_type = other RNA
nnnnnnnnnnnnnnnnnnnngttttagagctagcaagttaaaataaggcgtccgttatcacgggcaccgagtcggtgc

SEQ ID NO: 675 - RNA, 76 nt, synthetic construct
  misc_feature 1..76: note = Synthetic
  variation 1..20: note = n is a, c, g, or u
  modified_base 1: mod_base = OTHER; note = 2'-O-methyl nucleotide, phosphorothioate linkage
  modified_base 2: mod_base = OTHER; note = 2'-O-methyl nucleotide, phosphorothioate linkage
  modified_base 3: mod_base = OTHER; note = 2'-O-methyl nucleotide, phosphorothioate linkage
  modified_base 29: mod_base = OTHER; note = 2'-O-methyl nucleotide
  modified_base 30: mod_base = OTHER; note = 2'-O-methyl nucleotide
  modified_base 31: mod_base = OTHER; note = 2'-O-methyl nucleotide
  misc_feature 31..32: note = site of Linker L1
  modified_base 32: mod_base = OTHER; note = 2'-O-methyl nucleotide
  modified_base 33: mod_base = OTHER; note = 2'-O-methyl nucleotide
  modified_base 34: mod_base = OTHER; note = 2'-O-methyl nucleotide
  misc_feature 49..50: note = site of Linker L2
  misc_feature 60..61: note = site of Linker L1
  modified_base 73: mod_base = OTHER; note = phosphorothioate linkage
  modified_base 74: mod_base = OTHER; note = 2'-O-methyl nucleotide, phosphorothioate linkage
  modified_base 75: mod_base = OTHER; note = 2'-O-methyl nucleotide, phosphorothioate linkage
  modified_base 76: mod_base = OTHER; note = 2'-O-methyl nucleotide
  source 1..76: mol_type = other RNA
nnnnnnnnnnnnnnnnnnnngttttagagctagcaagttaaaataaggcgtccgttatcaggcaccgagtcggtgc

SEQ ID NO: 676 - RNA, 76 nt, synthetic construct; identical to SEQ ID NO: 675
  misc_feature 1..76: note = Synthetic
  variation 1..20: note = n is a, c, g, or u
  modified_base 1: mod_base = OTHER; note = 2'-O-methyl nucleotide, phosphorothioate linkage
  modified_base 2: mod_base = OTHER; note = 2'-O-methyl nucleotide, phosphorothioate linkage
  modified_base 3: mod_base = OTHER; note = 2'-O-methyl nucleotide, phosphorothioate linkage
  modified_base 29: mod_base = OTHER; note = 2'-O-methyl nucleotide
  modified_base 30: mod_base = OTHER; note = 2'-O-methyl nucleotide
  modified_base 31: mod_base = OTHER; note = 2'-O-methyl nucleotide
  misc_feature 31..32: note = site of Linker L1
  modified_base 32: mod_base = OTHER; note = 2'-O-methyl nucleotide
  modified_base 33: mod_base = OTHER; note = 2'-O-methyl nucleotide
  modified_base 34: mod_base = OTHER; note = 2'-O-methyl nucleotide
  misc_feature 49..50: note = site of Linker L2
  misc_feature 60..61: note = site of Linker L1
  modified_base 73: mod_base = OTHER; note = phosphorothioate linkage
  modified_base 74: mod_base = OTHER; note = 2'-O-methyl nucleotide, phosphorothioate linkage
  modified_base 75: mod_base = OTHER; note = 2'-O-methyl nucleotide, phosphorothioate linkage
  modified_base 76: mod_base = OTHER; note = 2'-O-methyl nucleotide
  source 1..76: mol_type = other RNA

SEQ ID NO: 677 - RNA, 76 nt, synthetic construct; identical to SEQ ID NO: 675
  misc_feature 1..76: note = Synthetic
  variation 1..20: note = n is a, c, g, or u
  modified_base 1: mod_base = OTHER; note = 2'-O-methyl nucleotide, phosphorothioate linkage
  modified_base 2: mod_base = OTHER; note = 2'-O-methyl nucleotide, phosphorothioate linkage
  modified_base 3: mod_base = OTHER; note = 2'-O-methyl nucleotide, phosphorothioate linkage
  modified_base 29: mod_base = OTHER; note = 2'-O-methyl nucleotide
  modified_base 30: mod_base = OTHER; note = 2'-O-methyl nucleotide
  modified_base 31: mod_base = OTHER; note = 2'-O-methyl nucleotide
  misc_feature 31..32: note = site of Linker L1
  modified_base 32: mod_base = OTHER; note = 2'-O-methyl nucleotide
  modified_base 33: mod_base = OTHER; note = 2'-O-methyl nucleotide
  modified_base 34: mod_base = OTHER; note = 2'-O-methyl nucleotide
  misc_feature 49..50: note = site of Linker L2
  misc_feature 60..61: note = site of Linker L1
  modified_base 73: mod_base = OTHER; note = phosphorothioate linkage
  modified_base 74: mod_base = OTHER; note = 2'-O-methyl nucleotide, phosphorothioate linkage
  modified_base 75: mod_base = OTHER; note = 2'-O-methyl nucleotide, phosphorothioate linkage
  modified_base 76: mod_base = OTHER; note = 2'-O-methyl nucleotide
  source 1..76: mol_type = other RNA

SEQ ID NO: 678 - RNA, 80 nt, synthetic construct; identical to SEQ ID NO: 671
  misc_feature 1..80: note = Synthetic
  variation 1..20: note = n is a, c, g, or u
  modified_base 1: mod_base = OTHER; note = 2'-O-methyl nucleotide, phosphorothioate linkage
  modified_base 2: mod_base = OTHER; note = 2'-O-methyl nucleotide, phosphorothioate linkage
  modified_base 3: mod_base = OTHER; note = 2'-O-methyl nucleotide, phosphorothioate linkage
  modified_base 29: mod_base = OTHER; note = 2'-O-methyl nucleotide
  modified_base 30: mod_base = OTHER; note = 2'-O-methyl nucleotide
  modified_base 31: mod_base = OTHER; note = 2'-O-methyl nucleotide
  modified_base 32: mod_base = OTHER; note = 2'-O-methyl nucleotide
  misc_feature 32..33: note = site of Linker L1
  modified_base 33: mod_base = OTHER; note = 2'-O-methyl nucleotide
  modified_base 34: mod_base = OTHER; note = 2'-O-methyl nucleotide
  modified_base 35: mod_base = OTHER; note = 2'-O-methyl nucleotide
  modified_base 36: mod_base = OTHER; note = 2'-O-methyl nucleotide
  misc_feature 51..52: note = site of Linker L2
  misc_feature 63..64: note = site of Linker L1
  modified_base 77: mod_base = OTHER; note = phosphorothioate linkage
  modified_base 78: mod_base = OTHER; note = 2'-O-methyl nucleotide, phosphorothioate linkage
  modified_base 79: mod_base = OTHER; note = 2'-O-methyl nucleotide, phosphorothioate linkage
  modified_base 80: mod_base = OTHER; note = 2'-O-methyl nucleotide
  source 1..80: mol_type = other RNA

SEQ ID NO: 679 - RNA, 78 nt, synthetic construct; identical to SEQ ID NO: 673
  misc_feature 1..78: note = Synthetic
  variation 1..20: note = n is a, c, g, or u
  modified_base 1: mod_base = OTHER; note = 2'-O-methyl nucleotide, phosphorothioate linkage
  modified_base 2: mod_base = OTHER; note = 2'-O-methyl nucleotide, phosphorothioate linkage
  modified_base 3: mod_base = OTHER; note = 2'-O-methyl nucleotide, phosphorothioate linkage
  modified_base 29: mod_base = OTHER; note = 2'-O-methyl nucleotide
  modified_base 30: mod_base = OTHER; note = 2'-O-methyl nucleotide
  modified_base 31: mod_base = OTHER; note = 2'-O-methyl nucleotide
  modified_base 32: mod_base = OTHER; note = 2'-O-methyl nucleotide
  misc_feature 32..33: note = site of Linker L1
  modified_base 33: mod_base = OTHER; note = 2'-O-methyl nucleotide
  modified_base 34: mod_base = OTHER; note = 2'-O-methyl nucleotide
  modified_base 35: mod_base = OTHER; note = 2'-O-methyl nucleotide
  modified_base 36: mod_base = OTHER; note = 2'-O-methyl nucleotide
  misc_feature 51..52: note = site of Linker L2
  misc_feature 62..63: note = site of Linker L1
  modified_base 75: mod_base = OTHER; note = phosphorothioate linkage
  modified_base 76: mod_base = OTHER; note = 2'-O-methyl nucleotide, phosphorothioate linkage
  modified_base 77: mod_base = OTHER; note = 2'-O-methyl nucleotide, phosphorothioate linkage
  modified_base 78: mod_base = OTHER; note = 2'-O-methyl nucleotide
  source 1..78: mol_type = other RNA

SEQ ID NO: 680 - RNA, 78 nt, synthetic construct; identical to SEQ ID NO: 674
  misc_feature 1..78: note = Synthetic
  variation 1..20: note = n is a, c, g, or u
  modified_base 1: mod_base = OTHER; note = 2'-O-methyl nucleotide, phosphorothioate linkage
  modified_base 2: mod_base = OTHER; note = 2'-O-methyl nucleotide, phosphorothioate linkage
  modified_base 3: mod_base = OTHER; note = 2'-O-methyl nucleotide, phosphorothioate linkage
  modified_base 29: mod_base = OTHER; note = 2'-O-methyl nucleotide
  modified_base 30: mod_base = OTHER; note = 2'-O-methyl nucleotide
  modified_base 31: mod_base = OTHER; note = 2'-O-methyl nucleotide
  misc_feature 31..32: note = site of Linker L1
  modified_base 32: mod_base = OTHER; note = 2'-O-methyl nucleotide
  modified_base 33: mod_base = OTHER; note = 2'-O-methyl nucleotide
  modified_base 34: mod_base = OTHER; note = 2'-O-methyl nucleotide
  misc_feature 49..50: note = site of Linker L2
  misc_feature 61..62: note = site of Linker L1
  modified_base 75: mod_base = OTHER; note = phosphorothioate linkage
  modified_base 76: mod_base = OTHER; note = 2'-O-methyl nucleotide, phosphorothioate linkage
  modified_base 77: mod_base = OTHER; note = 2'-O-methyl nucleotide, phosphorothioate linkage
  modified_base 78: mod_base = OTHER; note = 2'-O-methyl nucleotide
  source 1..78: mol_type = other RNA

SEQ ID NO: 681 - RNA, 76 nt, synthetic construct; identical to SEQ ID NO: 675
  misc_feature 1..76: note = Synthetic
  variation 1..20: note = n is a, c, g, or u
  modified_base 1: mod_base = OTHER; note = 2'-O-methyl nucleotide, phosphorothioate linkage
  modified_base 2: mod_base = OTHER; note = 2'-O-methyl nucleotide, phosphorothioate linkage
  modified_base 3: mod_base = OTHER; note = 2'-O-methyl nucleotide, phosphorothioate linkage
  modified_base 29: mod_base = OTHER; note = 2'-O-methyl nucleotide
  modified_base 30: mod_base = OTHER; note = 2'-O-methyl nucleotide
  modified_base 31: mod_base = OTHER; note = 2'-O-methyl nucleotide
  misc_feature 31..32: note = site of Linker L1
  modified_base 32: mod_base = OTHER; note = 2'-O-methyl nucleotide
  modified_base 33: mod_base = OTHER; note = 2'-O-methyl nucleotide
  modified_base 34: mod_base = OTHER; note = 2'-O-methyl nucleotide
  misc_feature 49..50: note = site of Linker L2
  misc_feature 60..61: note = site of Linker L1
  modified_base 73: mod_base = OTHER; note = phosphorothioate linkage
  modified_base 74: mod_base = OTHER; note = 2'-O-methyl nucleotide, phosphorothioate linkage
  modified_base 75: mod_base = OTHER; note = 2'-O-methyl nucleotide, phosphorothioate linkage
  modified_base 76: mod_base = OTHER; note = 2'-O-methyl nucleotide
  source 1..76: mol_type = other RNA

SEQ ID NO: 682 - RNA, 75 nt, synthetic construct
  misc_feature 1..75: note = Synthetic
  variation 1..20: note = n is a, c, g, or u
  modified_base 1: mod_base = OTHER; note = 2'-O-methyl nucleotide, phosphorothioate linkage
  modified_base 2: mod_base = OTHER; note = 2'-O-methyl nucleotide, phosphorothioate linkage
  modified_base 3: mod_base = OTHER; note = 2'-O-methyl nucleotide, phosphorothioate linkage
  modified_base 28..29: mod_base = OTHER; note = an abasic site having 1',2'-dideoxyribose modification
  misc_feature 57..58: note = site of Linker L1
  modified_base 72: mod_base = OTHER; note = 2'-O-methyl nucleotide, phosphorothioate linkage
  modified_base 73: mod_base = OTHER; note = 2'-O-methyl nucleotide, phosphorothioate linkage
  modified_base 74: mod_base = OTHER; note = 2'-O-methyl nucleotide, phosphorothioate linkage
  modified_base 75: mod_base = OTHER; note = 2'-O-methyl nucleotide
  source 1..75: mol_type = other RNA
nnnnnnnnnnnnnnnnnnnngttttagaaagttaaaataaggctagtccgttatcacgggcaccgagtcggtgct

SEQ ID NO: 683 - RNA, 75 nt, synthetic construct; identical to SEQ ID NO: 682
  misc_feature 1..75: note = Synthetic
  variation 1..20: note = n is a, c, g, or u
  modified_base 1: mod_base = OTHER; note = 2'-O-methyl nucleotide, phosphorothioate linkage
  modified_base 2: mod_base = OTHER; note = 2'-O-methyl nucleotide, phosphorothioate linkage
  modified_base 3: mod_base = OTHER; note = 2'-O-methyl nucleotide, phosphorothioate linkage
  misc_feature 28..29: note = site of Linker L4
  misc_feature 57..58: note = site of Linker L1
  modified_base 72: mod_base = OTHER; note = 2'-O-methyl nucleotide, phosphorothioate linkage
  modified_base 73: mod_base = OTHER; note = 2'-O-methyl nucleotide, phosphorothioate linkage
  modified_base 74: mod_base = OTHER; note = 2'-O-methyl nucleotide, phosphorothioate linkage
  modified_base 75: mod_base = OTHER; note = 2'-O-methyl nucleotide
  source 1..75: mol_type = other RNA

SEQ ID NO: 684 - RNA, 75 nt, synthetic construct; identical to SEQ ID NO: 682
  misc_feature 1..75: note = Synthetic
  variation 1..20: note = n is a, c, g, or u
  modified_base 1: mod_base = OTHER; note = 2'-O-methyl nucleotide, phosphorothioate linkage
  modified_base 2: mod_base = OTHER; note = 2'-O-methyl nucleotide, phosphorothioate linkage
  modified_base 3: mod_base = OTHER; note = 2'-O-methyl nucleotide, phosphorothioate linkage
  misc_feature 28..29: note = site of Linker L3
  misc_feature 57..58: note = site of Linker L1
  modified_base 72: mod_base = OTHER; note = 2'-O-methyl nucleotide, phosphorothioate linkage
  modified_base 73: mod_base = OTHER; note = 2'-O-methyl nucleotide, phosphorothioate linkage
  modified_base 74: mod_base = OTHER; note = 2'-O-methyl nucleotide, phosphorothioate linkage
  modified_base 75: mod_base = OTHER; note = 2'-O-methyl nucleotide
  source 1..75: mol_type = other RNA

SEQ ID NO: 685 - RNA, 75 nt, synthetic construct; identical to SEQ ID NO: 682
  misc_feature 1..75: note = Synthetic
  variation 1..20: note = n is a, c, g, or u
  modified_base 1: mod_base = OTHER; note = 2'-O-methyl nucleotide, phosphorothioate linkage
  modified_base 2: mod_base = OTHER; note = 2'-O-methyl nucleotide, phosphorothioate linkage
  modified_base 3: mod_base = OTHER; note = 2'-O-methyl nucleotide, phosphorothioate linkage
  misc_feature 28..29: note = site of Linker L3
  misc_feature 57..58: note = site of Linker L1
  modified_base 72: mod_base = OTHER; note = 2'-O-methyl nucleotide, phosphorothioate linkage
  modified_base 73: mod_base = OTHER; note = 2'-O-methyl nucleotide, phosphorothioate linkage
  modified_base 74: mod_base = OTHER; note = 2'-O-methyl nucleotide, phosphorothioate linkage
  modified_base 75: mod_base = OTHER; note = 2'-O-methyl nucleotide
  source 1..75: mol_type = other RNA

SEQ ID NO: 686 - RNA, 75 nt, synthetic construct; identical to SEQ ID NO: 682
  misc_feature 1..75: note = Synthetic
  variation 1..20: note = n is a, c, g, or u
  modified_base 1: mod_base = OTHER; note = 2'-O-methyl nucleotide, phosphorothioate linkage
  modified_base 2: mod_base = OTHER; note = 2'-O-methyl nucleotide, phosphorothioate linkage
  modified_base 3: mod_base = OTHER; note = 2'-O-methyl nucleotide, phosphorothioate linkage
  misc_feature 28..29: note = site of Linker L1
  misc_feature 57..58: note = site of Linker L1
  modified_base 72: mod_base = OTHER; note = 2'-O-methyl nucleotide, phosphorothioate linkage
  modified_base 73: mod_base = OTHER; note = 2'-O-methyl nucleotide, phosphorothioate linkage
  modified_base 74: mod_base = OTHER; note = 2'-O-methyl nucleotide, phosphorothioate linkage
  modified_base 75: mod_base = OTHER; note = 2'-O-methyl nucleotide
  source 1..75: mol_type = other RNA

SEQ ID NO: 687 - RNA, 79 nt, synthetic construct
  misc_feature 1..79: note = Synthetic
  variation 1..20: note = n is a, c, g, or u
  modified_base 1: mod_base = OTHER; note = 2'-O-methyl nucleotide, phosphorothioate linkage
  modified_base 2: mod_base = OTHER; note = 2'-O-methyl nucleotide, phosphorothioate linkage
  modified_base 3: mod_base = OTHER; note = 2'-O-methyl nucleotide, phosphorothioate linkage
  modified_base 29: mod_base = OTHER; note = 2'-O-methyl nucleotide
  modified_base 30: mod_base = OTHER; note = 2'-O-methyl nucleotide
  misc_feature 30..31: note = site of Linker L1
  modified_base 31: mod_base = OTHER; note = 2'-O-methyl nucleotide
  modified_base 32: mod_base = OTHER; note = 2'-O-methyl nucleotide
  misc_feature 61..62: note = site of Linker L1
  modified_base 76: mod_base = OTHER; note = 2'-O-methyl nucleotide, phosphorothioate linkage
  modified_base 77: mod_base = OTHER; note = 2'-O-methyl nucleotide, phosphorothioate linkage
  modified_base 78: mod_base = OTHER; note = 2'-O-methyl nucleotide, phosphorothioate linkage
  modified_base 79: mod_base = OTHER; note = 2'-O-methyl nucleotide
  source 1..79: mol_type = other RNA
nnnnnnnnnnnnnnnnnnnngttttagagcgcaagttaaaataaggctagtccgttatcacgggcaccgagtcggtgct

SEQ ID NO: 688 - RNA, 83 nt, synthetic construct
  misc_feature 1..83: note = Synthetic
  variation 1..20: note = n is a, c, g, or u
  modified_base 1: mod_base = OTHER; note = 2'-O-methyl nucleotide, phosphorothioate linkage
  modified_base 2: mod_base = OTHER; note = 2'-O-methyl nucleotide, phosphorothioate linkage
  modified_base 3: mod_base = OTHER; note = 2'-O-methyl nucleotide, phosphorothioate linkage
  modified_base 29: mod_base = OTHER; note = 2'-O-methyl nucleotide
  modified_base 30: mod_base = OTHER; note = 2'-O-methyl nucleotide
  modified_base 31: mod_base = OTHER; note = 2'-O-methyl nucleotide
  modified_base 32: mod_base = OTHER; note = 2'-O-methyl nucleotide
  misc_feature 32..33: note = site of Linker L1
  modified_base 33: mod_base = OTHER; note = 2'-O-methyl nucleotide
  modified_base 34: mod_base = OTHER; note = 2'-O-methyl nucleotide
  modified_base 35: mod_base = OTHER; note = 2'-O-methyl nucleotide
  modified_base 36: mod_base = OTHER; note = 2'-O-methyl nucleotide
  misc_feature 65..66: note = site of Linker L1
  modified_base 80: mod_base = OTHER; note = 2'-O-methyl nucleotide, phosphorothioate linkage
  modified_base 81: mod_base = OTHER; note = 2'-O-methyl nucleotide, phosphorothioate linkage
  modified_base 82: mod_base = OTHER; note = 2'-O-methyl nucleotide, phosphorothioate linkage
  modified_base 83: mod_base = OTHER; note = 2'-O-methyl nucleotide
  source 1..83: mol_type = other RNA
nnnnnnnnnnnnnnnnnnnngttttagagctatagcaagttaaaataaggctagtccgttatcacgggcaccgagtcggtgct

SEQ ID NO: 689 - RNA, 83 nt, synthetic construct; identical to SEQ ID NO: 688
  misc_feature 1..83: note = Synthetic
  variation 1..20: note = n is a, c, g, or u
  modified_base 1: mod_base = OTHER; note = 2'-O-methyl nucleotide, phosphorothioate linkage
  modified_base 2: mod_base = OTHER; note = 2'-O-methyl nucleotide, phosphorothioate linkage
  modified_base 3: mod_base = OTHER; note = 2'-O-methyl nucleotide, phosphorothioate linkage
  modified_base 29: mod_base = OTHER; note = 2'-O-methyl nucleotide
  modified_base 30: mod_base = OTHER; note = 2'-O-methyl nucleotide
  modified_base 31: mod_base = OTHER; note = 2'-O-methyl nucleotide
  modified_base 32: mod_base = OTHER; note = 2'-O-methyl nucleotide
  misc_feature 32..33: note = site of Linker L1
  modified_base 33: mod_base = OTHER; note = 2'-O-methyl nucleotide
  modified_base 34: mod_base = OTHER; note = 2'-O-methyl nucleotide
  modified_base 35: mod_base = OTHER; note = 2'-O-methyl nucleotide
  modified_base 36: mod_base = OTHER; note = 2'-O-methyl nucleotide
  misc_feature 65..66: note = site of Linker L1
  modified_base 77: mod_base = OTHER; note = 2'-O-methyl nucleotide
  modified_base 78: mod_base = OTHER; note = 2'-O-methyl nucleotide
  modified_base 79: mod_base = OTHER; note = 2'-O-methyl nucleotide
  modified_base 80: mod_base = OTHER; note = 2'-O-methyl nucleotide, phosphorothioate linkage
  modified_base 81: mod_base = OTHER; note = 2'-O-methyl nucleotide, phosphorothioate linkage
  modified_base 82: mod_base = OTHER; note = 2'-O-methyl nucleotide, phosphorothioate linkage
  modified_base 83: mod_base = OTHER; note = 2'-O-methyl nucleotide
  source 1..83: mol_type = other RNA

SEQ ID NO: 690-699 - skipped (10 entries)

SEQ ID NO: 700 - RNA, 146 nt, synthetic construct
  misc_feature 1..146: note = Synthetic
  variation 1..25: note = n is a, c, g, or u
  source 1..146: mol_type = other RNA
nnnnnnnnnnnnnnnnnnnnnnnnngttgtagctccctttctcatttcggaaacgaaatgagaaccgttgctacaataaggccgtctgaaaagatgtgccgcaacgctctgccccttaaagcttctgctttaaggggcatcgttta

SEQ ID NO: 701 - RNA, 146 nt, synthetic construct; identical to SEQ ID NO: 700
  misc_feature 1..146: note = Synthetic
  variation 1..25: note = n is a, c, g, or u
  variation 21..25: note = n may be present or absent
  source 1..146: mol_type = other RNA

SEQ ID NO: 702 - RNA, 102 nt, synthetic construct
  misc_feature 1..102: note = Synthetic
  variation 1..25: note = n is a, c, g, or u
  variation 21..25: note = n may be present or absent
  source 1..102: mol_type = other RNA
nnnnnnnnnnnnnnnnnnnnnnnnngttgtagctccctgaaaccgttgctacaataaggccgtcgaaagatgtgccgcaacgctctgccttctggcatcgtt

SEQ ID NO: 703 - RNA, 106 nt, synthetic construct
  misc_feature 1..106: note = Synthetic
  variation 1..25: note = n is a, c, g, or u
  variation 21..25: note = n may be present or absent
  source 1..106: mol_type = other RNA
nnnnnnnnnnnnnnnnnnnnnnnnngttgtagctcccttcgaaagaccgttgctacaataaggccgtcgaaagatgtgccgcaacgctctgccttctggcatcgtt

SEQ ID NO: 704 - RNA, 108 nt, synthetic construct
  misc_feature 1..108: note = Synthetic
  variation 1..25: note = n is a, c, g, or u
  variation 21..25: note = n may be present or absent
  source 1..108: mol_type = other RNA
nnnnnnnnnnnnnnnnnnnnnnnnngttgtagctccctggaaacccgttgctacaataaggccgtcgaaagatgtgccgcaacgctctgccttctggcatcgtttatt

SEQ ID NO: 705 - RNA, 121 nt, synthetic construct
  misc_feature 1..121: note = Synthetic
  source 1..121: mol_type = other RNA
gttgtagctccctttctcatttcggaaacgaaatgagaaccgttgctacaataaggccgtctgaaaagatgtgccgcaacgctctgccccttaaagcttctgctttaaggggcatcgttta

SEQ ID NO: 706 - RNA, 77 nt, synthetic construct
  misc_feature 1..77: note = Synthetic
  source 1..77: mol_type = other RNA
gttgtagctccctgaaaccgttgctacaataaggccgtcgaaagatgtgccgcaacgctctgccttctggcatcgtt

SEQ ID NO: 707 - RNA, 81 nt, synthetic construct
  misc_feature 1..81: note = Synthetic
  source 1..81: mol_type = other RNA
gttgtagctcccttcgaaagaccgttgctacaataaggccgtcgaaagatgtgccgcaacgctctgccttctggcatcgtt

SEQ ID NO: 708 - RNA, 83 nt, synthetic construct
  misc_feature 1..83: note = Synthetic
  source 1..83: mol_type = other RNA
gttgtagctccctggaaacccgttgctacaataaggccgtcgaaagatgtgccgcaacgctctgccttctggcatcgtttatt

SEQ ID NO: 709 - skipped

SEQ ID NO: 710 - RNA, 77 nt, synthetic construct; identical to SEQ ID NO: 706
  misc_feature 1..77: note = Synthetic
  modified_base 1: mod_base = OTHER; note = 2'-O-methyl nucleotide
  modified_base 5: mod_base = OTHER; note = 2'-O-methyl nucleotide
  modified_base 6: mod_base = OTHER; note = 2'-O-methyl nucleotide
  modified_base 7: mod_base = OTHER; note = 2'-O-methyl nucleotide
  modified_base 8: mod_base = OTHER; note = 2'-O-methyl nucleotide
  modified_base 13: mod_base = OTHER; note = 2'-O-methyl nucleotide
  modified_base 14: mod_base = OTHER; note = 2'-O-methyl nucleotide
  modified_base 15: mod_base = OTHER; note = 2'-O-methyl nucleotide
  modified_base 16: mod_base = OTHER; note = 2'-O-methyl nucleotide
  modified_base 17: mod_base = OTHER; note = 2'-O-methyl nucleotide
  modified_base 18: mod_base = OTHER; note = 2'-O-methyl nucleotide
  modified_base 19: mod_base = OTHER; note = 2'-O-methyl nucleotide
  modified_base 23: mod_base = OTHER; note = 2'-O-methyl nucleotide
  modified_base 24: mod_base = OTHER; note = 2'-O-methyl nucleotide
  modified_base 27: mod_base = OTHER; note = 2'-O-methyl nucleotide
  modified_base 30: mod_base = OTHER; note = phosphorothioate linkage
  modified_base 34: mod_base = OTHER; note = 2'-O-methyl nucleotide
  modified_base 35: mod_base = OTHER; note = 2'-O-methyl nucleotide
  modified_base 37: mod_base = OTHER; note = 2'-O-methyl nucleotide
  modified_base 38: mod_base = OTHER; note = 2'-O-methyl nucleotide
  modified_base 39: mod_base = OTHER; note = 2'-O-methyl nucleotide
  modified_base 40: mod_base = OTHER; note = 2'-O-methyl nucleotide
  modified_base 41: mod_base = OTHER; note = 2'-O-methyl nucleotide
  modified_base 42: mod_base = OTHER; note = 2'-O-methyl nucleotide
  modified_base 43: mod_base = OTHER; note = 2'-O-methyl nucleotide
  modified_base 44: mod_base = OTHER; note = 2'-O-methyl nucleotide
  modified_base 45: mod_base = OTHER; note = 2'-O-methyl nucleotide
  modified_base 46: mod_base = OTHER; note = 2'-O-methyl nucleotide
  modified_base 51: mod_base = OTHER; note = 2'-O-methyl nucleotide
  modified_base 54: mod_base = OTHER; note = 2'-O-methyl nucleotide
  modified_base 55: mod_base = OTHER; note = 2'-O-methyl nucleotide
  modified_base 56: mod_base = OTHER; note = 2'-O-methyl nucleotide
  modified_base 57: mod_base = OTHER; note = 2'-O-methyl nucleotide
  modified_base 62: mod_base = OTHER; note = 2'-O-methyl nucleotide
  modified_base 63: mod_base = OTHER; note = 2'-O-methyl nucleotide
  modified_base 65: mod_base = OTHER; note = 2'-O-methyl nucleotide
  modified_base 66: mod_base = OTHER; note = 2'-O-methyl nucleotide
  modified_base 67: mod_base = OTHER; note = 2'-O-methyl nucleotide
  modified_base 68: mod_base = OTHER; note = 2'-O-methyl nucleotide
  modified_base 70: mod_base = OTHER; note = 2'-O-methyl nucleotide
  modified_base 72: mod_base = OTHER; note = 2'-O-methyl nucleotide
  modified_base 73: mod_base = OTHER; note = 2'-O-methyl nucleotide
  modified_base 74: mod_base = OTHER; note = phosphorothioate linkage
  modified_base 75: mod_base = OTHER; note = 2'-O-methyl nucleotide, phosphorothioate linkage
  modified_base 76: mod_base = OTHER; note = 2'-O-methyl nucleotide, phosphorothioate linkage
  modified_base 77: mod_base = OTHER; note = 2'-O-methyl nucleotide
  source 1..77: mol_type = other RNA

SEQ ID NO: 711 - skipped

SEQ ID NO: 712 - RNA, 77 nt, synthetic construct; identical to SEQ ID NO: 706
  misc_feature 1..77: note = Synthetic
  modified_base 1: mod_base = OTHER; note = 2'-O-methyl nucleotide
  modified_base 5: mod_base = OTHER; note = 2'-O-methyl nucleotide
  modified_base 6: mod_base = OTHER; note = 2'-O-methyl nucleotide
  modified_base 7: mod_base = OTHER; note = 2'-O-methyl nucleotide
  modified_base 8: mod_base = OTHER; note = 2'-O-methyl nucleotide
  modified_base 13: mod_base = OTHER; note = 2'-O-methyl nucleotide
  modified_base 14: mod_base = OTHER; note = 2'-O-methyl nucleotide
  modified_base 15: mod_base = OTHER; note = 2'-O-methyl nucleotide
  modified_base 16: mod_base = OTHER; note = 2'-O-methyl nucleotide
  modified_base 17: mod_base = OTHER; note = 2'-O-methyl nucleotide
  modified_base 18: mod_base = OTHER; note = 2'-O-methyl nucleotide
  modified_base 19: mod_base = OTHER; note = 2'-O-methyl nucleotide
  modified_base 23: mod_base = OTHER; note = 2'-O-methyl nucleotide
  modified_base 24: mod_base = OTHER; note = 2'-O-methyl nucleotide
  modified_base 27: mod_base = OTHER; note = 2'-O-methyl nucleotide
  modified_base 30: mod_base = OTHER; note = phosphorothioate linkage
  modified_base 34: mod_base = OTHER; note = 2'-O-methyl nucleotide
  modified_base 35: mod_base = OTHER; note = 2'-O-methyl nucleotide
  modified_base 37: mod_base = OTHER; note = 2'-O-methyl nucleotide
  modified_base 38: mod_base = OTHER; note = 2'-O-methyl nucleotide
  modified_base 39: mod_base = OTHER; note = 2'-O-methyl nucleotide
  modified_base 40: mod_base = OTHER; note = 2'-O-methyl nucleotide
  modified_base 41: mod_base = OTHER; note = 2'-O-methyl nucleotide
  modified_base 42: mod_base = OTHER; note = 2'-O-methyl nucleotide
  modified_base 43: mod_base = OTHER; note = 2'-O-methyl nucleotide
  modified_base 44: mod_base = OTHER; note = 2'-O-methyl nucleotide
  modified_base 45: mod_base = OTHER; note = 2'-O-methyl nucleotide
  modified_base 46: mod_base = OTHER; note = 2'-O-methyl nucleotide
  modified_base 51: mod_base = OTHER; note = 2'-O-methyl nucleotide
  modified_base 53: mod_base = OTHER; note = 2'-O-methyl nucleotide
  modified_base 56: mod_base = OTHER; note = 2'-O-methyl nucleotide
  modified_base 62: mod_base = OTHER; note = 2'-O-methyl nucleotide
  modified_base 63: mod_base = OTHER; note = 2'-O-methyl nucleotide
  modified_base 65: mod_base = OTHER; note = 2'-O-methyl nucleotide
  modified_base 66: mod_base = OTHER; note = 2'-O-methyl nucleotide
  modified_base 67: mod_base = OTHER; note = 2'-O-methyl nucleotide
  modified_base 68: mod_base = OTHER; note = 2'-O-methyl nucleotide
  modified_base 75: mod_base = OTHER; note = phosphorothioate linkage
  modified_base 76: mod_base = OTHER; note = 2'-O-methyl nucleotide, phosphorothioate linkage
  modified_base 77: mod_base = OTHER; note = 2'-O-methyl nucleotide, phosphorothioate linkage
  source 1..77: mol_type = other RNA

SEQ ID NO: 713 - RNA, 77 nt, synthetic construct; identical to SEQ ID NO: 706
  misc_feature 1..77: note = Synthetic
  modified_base 1: mod_base = OTHER; note = 2'-O-methyl nucleotide
  modified_base 5: mod_base = OTHER; note = 2'-O-methyl nucleotide
  modified_base 6: mod_base = OTHER; note = 2'-O-methyl nucleotide
  modified_base 7: mod_base = OTHER; note = 2'-O-methyl nucleotide
  modified_base 8: mod_base = OTHER; note = 2'-O-methyl nucleotide
  modified_base 13: mod_base = OTHER; note = 2'-O-methyl nucleotide
  modified_base 14: mod_base = OTHER; note = 2'-O-methyl nucleotide
  modified_base 15: mod_base = OTHER; note = 2'-O-methyl nucleotide
  modified_base 16: mod_base = OTHER; note = 2'-O-methyl nucleotide
  modified_base 17: mod_base = OTHER; note = 2'-O-methyl nucleotide
  modified_base 18: mod_base = OTHER; note = 2'-O-methyl nucleotide
  modified_base 19: mod_base = OTHER; note = 2'-O-methyl nucleotide
  modified_base 23: mod_base = OTHER; note = 2'-O-methyl nucleotide
  modified_base 24: mod_base = OTHER; note = 2'-O-methyl nucleotide
  modified_base 27: mod_base = OTHER; note = 2'-O-methyl nucleotide
  modified_base 34: mod_base = OTHER; note = 2'-O-methyl nucleotide
  modified_base 35: mod_base = OTHER; note = 2'-O-methyl nucleotide
  modified_base 37: mod_base = OTHER; note = 2'-O-methyl nucleotide
  modified_base 38: mod_base = OTHER; note = 2'-O-methyl nucleotide
  modified_base 39: mod_base = OTHER; note = 2'-O-methyl nucleotide
  modified_base 40: mod_base = OTHER; note = 2'-O-methyl nucleotide
  modified_base 41: mod_base = OTHER; note = 2'-O-methyl nucleotide
  modified_base 42: mod_base = OTHER; note = 2'-O-methyl nucleotide
  modified_base 43: mod_base = OTHER; note = 2'-O-methyl nucleotide
  modified_base 44: mod_base = OTHER; note = 2'-O-methyl nucleotide
  modified_base 45: mod_base = OTHER; note = 2'-O-methyl nucleotide
  modified_base 46: mod_base = OTHER; note = 2'-O-methyl nucleotide
  modified_base 51: mod_base = OTHER; note = 2'-O-methyl nucleotide
  modified_base 53: mod_base = OTHER; note = 2'-O-methyl nucleotide
  modified_base 56: mod_base = OTHER; note = 2'-O-methyl nucleotide
  modified_base 62: mod_base = OTHER; note = 2'-O-methyl nucleotide
  modified_base 63: mod_base = OTHER; note = 2'-O-methyl nucleotide
  modified_base 65: mod_base = OTHER; note = 2'-O-methyl nucleotide
  modified_base 66: mod_base = OTHER; note = 2'-O-methyl nucleotide
  modified_base 67: mod_base = OTHER; note = 2'-O-methyl nucleotide
  modified_base 68: mod_base = OTHER; note = 2'-O-methyl nucleotide
  modified_base 75: mod_base = OTHER; note = phosphorothioate linkage
  modified_base 76: mod_base = OTHER; note = 2'-O-methyl nucleotide, phosphorothioate linkage
  modified_base 77: mod_base = OTHER; note = 2'-O-methyl nucleotide
  source 1..77: mol_type = other RNA

SEQ ID NO: 714 - RNA, 77 nt, synthetic construct; identical to SEQ ID NO: 706
  misc_feature 1..77: note = Synthetic
  modified_base 1: mod_base = OTHER; note = 2'-O-methyl nucleotide
  modified_base 5: mod_base = OTHER; note = 2'-O-methyl nucleotide
  modified_base 6: mod_base = OTHER; note = 2'-O-methyl nucleotide
  modified_base 7: mod_base = OTHER; note = 2'-O-methyl nucleotide
  modified_base 8: mod_base = OTHER; note = 2'-O-methyl nucleotide
  modified_base 13: mod_base = OTHER; note = 2'-O-methyl nucleotide
  modified_base 14: mod_base = OTHER; note = 2'-O-methyl nucleotide
  modified_base 15: mod_base = OTHER; note = 2'-O-methyl nucleotide
  modified_base 16: mod_base = OTHER; note = 2'-O-methyl nucleotide
  modified_base 17: mod_base = OTHER; note = 2'-O-methyl nucleotide
  modified_base 18: mod_base = OTHER; note = 2'-O-methyl nucleotide
  modified_base 19: mod_base = OTHER; note = 2'-O-methyl nucleotide
  modified_base 23: mod_base = OTHER; note = 2'-O-methyl nucleotide
  modified_base 24: mod_base = OTHER; note = 2'-O-methyl nucleotide
  modified_base 27: mod_base = OTHER; note = 2'-O-methyl nucleotide
  modified_base 30: mod_base = OTHER; note = phosphorothioate linkage
  modified_base 34: mod_base = OTHER; note = 2'-O-methyl nucleotide
  modified_base 35: mod_base = OTHER; note = 2'-O-methyl nucleotide
  modified_base 37: mod_base = OTHER; note = 2'-O-methyl nucleotide
  modified_base 38: mod_base = OTHER; note = 2'-O-methyl nucleotide
  modified_base 39: mod_base = OTHER; note = 2'-O-methyl nucleotide
  modified_base 40: mod_base = OTHER; note = 2'-O-methyl nucleotide
  modified_base 41: mod_base = OTHER; note = 2'-O-methyl nucleotide
  modified_base 42: mod_base = OTHER; note = 2'-O-methyl nucleotide
  modified_base 43: mod_base = OTHER; note = 2'-O-methyl nucleotide
  modified_base 44: mod_base = OTHER; note = 2'-O-methyl nucleotide
  modified_base 45: mod_base = OTHER; note = 2'-O-methyl nucleotide
  modified_base 46: mod_base = OTHER; note = 2'-O-methyl nucleotide
  modified_base 51: mod_base = OTHER; note = 2'-O-methyl nucleotide
  modified_base 53: mod_base = OTHER; note = 2'-O-methyl nucleotide
  modified_base 56: mod_base = OTHER; note = 2'-O-methyl nucleotide
  modified_base 58: mod_base = OTHER; note = 2'-O-methyl nucleotide
  modified_base 59: mod_base = OTHER; note = 2'-O-methyl nucleotide
  modified_base 60: mod_base = OTHER; note = 2'-O-methyl nucleotide
  modified_base 61: mod_base = OTHER; note = 2'-O-methyl nucleotide
  modified_base 62: mod_base = OTHER; note = 2'-O-methyl nucleotide
  modified_base 63: mod_base = OTHER; note = 2'-O-methyl nucleotide
  modified_base 65: mod_base = OTHER; note = 2'-O-methyl nucleotide
  modified_base 66: mod_base = OTHER; note = 2'-O-methyl nucleotide
  modified_base 67: mod_base = OTHER; note = 2'-O-methyl nucleotide
  modified_base 68: mod_base = OTHER; note = 2'-O-methyl nucleotide
  modified_base 75: mod_base = OTHER; note = phosphorothioate linkage
  modified_base 76: mod_base = OTHER; note = 2'-O-methyl nucleotide, phosphorothioate linkage
  modified_base 77: mod_base = OTHER; note = 2'-O-methyl nucleotide
  source 1..77: mol_type = other RNA

SEQ ID NO: 715 - RNA, 77 nt, synthetic construct; identical to SEQ ID NO: 706
  misc_feature 1..77: note = Synthetic
  modified_base 1: mod_base = OTHER; note = 2'-O-methyl nucleotide
  modified_base 5: mod_base = OTHER; note = 2'-O-methyl nucleotide
  modified_base 6: mod_base = OTHER; note = 2'-O-methyl nucleotide
  modified_base 7: mod_base = OTHER; note = 2'-O-methyl nucleotide
  modified_base 8: mod_base = OTHER; note = 2'-O-methyl nucleotide
  modified_base 13: mod_base = OTHER; note = 2'-O-methyl nucleotide
  modified_base 14: mod_base = OTHER; note = 2'-O-methyl nucleotide
  modified_base 15: mod_base = OTHER; note = 2'-O-methyl nucleotide
  modified_base 16: mod_base = OTHER; note = 2'-O-methyl nucleotide
  modified_base 17: mod_base = OTHER; note = 2'-O-methyl nucleotide
  modified_base 18: mod_base = OTHER; note = 2'-O-methyl nucleotide
  modified_base 19: mod_base = OTHER; note = 2'-O-methyl nucleotide
  modified_base 23: mod_base = OTHER; note = 2'-O-methyl nucleotide
  modified_base 24: mod_base = OTHER; note = 2'-O-methyl nucleotide
  modified_base 27: mod_base = OTHER; note = 2'-O-methyl nucleotide
  modified_base 34: mod_base = OTHER; note = 2'-O-methyl nucleotide
  modified_base 35: mod_base = OTHER; note = 2'-O-methyl nucleotide
  modified_base 37: mod_base = OTHER; note = 2'-O-methyl nucleotide
  modified_base 38: mod_base = OTHER; note = 2'-O-methyl nucleotide
  modified_base 39: mod_base = OTHER; note = 2'-O-methyl nucleotide
  modified_base 40: mod_base = OTHER; note = 2'-O-methyl nucleotide
  modified_base 41: mod_base = OTHER; note = 2'-O-methyl nucleotide
  modified_base 42: mod_base = OTHER; note = 2'-O-methyl nucleotide
  modified_base 43: mod_base = OTHER; note = 2'-O-methyl nucleotide
  modified_base 44: mod_base = OTHER; note = 2'-O-methyl nucleotide
  modified_base 45: mod_base = OTHER; note = 2'-O-methyl nucleotide
  modified_base 46: mod_base = OTHER; note = 2'-O-methyl nucleotide
  modified_base 51: mod_base = OTHER; note = 2'-O-methyl nucleotide
  modified_base 53: mod_base = OTHER; note = 2'-O-methyl nucleotide
  modified_base 56: mod_base = OTHER; note = 2'-O-methyl nucleotide
  modified_base 58: mod_base = OTHER; note = 2'-O-methyl nucleotide
  modified_base 59: mod_base = OTHER; note = 2'-O-methyl nucleotide
  modified_base 60: mod_base = OTHER; note = 2'-O-methyl nucleotide
  modified_base 61: mod_base = OTHER; note = 2'-O-methyl nucleotide
  modified_base 62: mod_base = OTHER; note = 2'-O-methyl nucleotide
  modified_base 63: mod_base = OTHER; note = 2'-O-methyl nucleotide
  modified_base 65: mod_base = OTHER; note = 2'-O-methyl nucleotide
  modified_base 66: mod_base = OTHER; note = 2'-O-methyl nucleotide
  modified_base 67: mod_base = OTHER; note = 2'-O-methyl nucleotide
  modified_base 68: mod_base = OTHER; note = 2'-O-methyl nucleotide
  modified_base 75: mod_base = OTHER; note = phosphorothioate linkage
  modified_base 76: mod_base = OTHER; note = 2'-O-methyl nucleotide, phosphorothioate linkage
  modified_base 77: mod_base = OTHER; note = 2'-O-methyl nucleotide
  source 1..77: mol_type = other RNA

SEQ ID NO: 716 - RNA, 81 nt, synthetic construct; identical to SEQ ID NO: 707
  misc_feature 1..81: note = Synthetic
  modified_base 1: mod_base = OTHER; note = 2'-O-methyl nucleotide
  modified_base 5: mod_base = OTHER; note = 2'-O-methyl nucleotide
  modified_base 6: mod_base = OTHER; note = 2'-O-methyl nucleotide
  modified_base 7: mod_base = OTHER; note = 2'-O-methyl nucleotide
  modified_base 8: mod_base = OTHER; note = 2'-O-methyl nucleotide
  modified_base 13: mod_base = OTHER; note = 2'-O-methyl nucleotide
  modified_base 14: mod_base = OTHER; note = 2'-O-methyl nucleotide
  modified_base 15: mod_base = OTHER; note = 2'-O-methyl nucleotide
  modified_base 16: mod_base = OTHER; note = 2'-O-methyl nucleotide
  modified_base 17: mod_base = OTHER; note = 2'-O-methyl nucleotide
  modified_base 18: mod_base = OTHER; note = 2'-O-methyl nucleotide
  modified_base 19: mod_base = OTHER; note = 2'-O-methyl nucleotide
  modified_base 20: mod_base = OTHER; note = 2'-O-methyl nucleotide
  modified_base 21: mod_base = OTHER; note = 2'-O-methyl nucleotide
  modified_base 22: mod_base = OTHER; note = 2'-O-methyl nucleotide
  modified_base 23: mod_base = OTHER; note = 2'-O-methyl nucleotide
  modified_base 27: mod_base = OTHER; note = 2'-O-methyl nucleotide
  modified_base 28: mod_base = OTHER; note = 2'-O-methyl nucleotide
  modified_base 31: mod_base = OTHER; note = 2'-O-methyl nucleotide
  modified_base 34: mod_base = OTHER; note = phosphorothioate linkage
  modified_base 38: mod_base = OTHER; note = 2'-O-methyl nucleotide
  modified_base 39: mod_base = OTHER; note = 2'-O-methyl nucleotide
  modified_base 41: mod_base = OTHER; note = 2'-O-methyl nucleotide
  modified_base 42: mod_base = OTHER; note = 2'-O-methyl nucleotide
  modified_base 43: mod_base = OTHER; note = 2'-O-methyl nucleotide
  modified_base 44: mod_base = OTHER; note = 2'-O-methyl nucleotide
  modified_base 45: mod_base = OTHER; note = 2'-O-methyl nucleotide
  modified_base 46: mod_base = OTHER; note = 2'-O-methyl nucleotide
  modified_base 47: mod_base = OTHER; note = 2'-O-methyl nucleotide
  modified_base 48: mod_base = OTHER; note = 2'-O-methyl nucleotide
  modified_base 49: mod_base = OTHER; note = 2'-O-methyl nucleotide
  modified_base 50: mod_base = OTHER; note = 2'-O-methyl nucleotide
  modified_base 55: mod_base = OTHER; note = 2'-O-methyl nucleotide
  modified_base 57: mod_base = OTHER; note = 2'-O-methyl nucleotide
  modified_base 60: mod_base = OTHER; note = 2'-O-methyl nucleotide
  modified_base 66: mod_base = OTHER; note = 2'-O-methyl nucleotide
  modified_base 67: mod_base = OTHER; note = 2'-O-methyl nucleotide
  modified_base 69: mod_base = OTHER; note = 2'-O-methyl nucleotide
  modified_base 70: mod_base = OTHER; note = 2'-O-methyl nucleotide
  modified_base 71: mod_base = OTHER; note = 2'-O-methyl nucleotide
  modified_base 72: mod_base = OTHER; note = 2'-O-methyl nucleotide
  modified_base 79: mod_base = OTHER; note = phosphorothioate linkage
  modified_base 80: mod_base = OTHER; note = 2'-O-methyl nucleotide, phosphorothioate linkage
  modified_base 81: mod_base = OTHER; note = 2'-O-methyl nucleotide
  source 1..81: mol_type = other RNA

SEQ ID NO: 717 - RNA, 81 nt, synthetic construct; identical to SEQ ID NO: 707
  misc_feature 1..81: note = Synthetic
  modified_base 1: mod_base = OTHER; note = 2'-O-methyl nucleotide
  modified_base 5: mod_base = OTHER; note = 2'-O-methyl nucleotide
  modified_base 6: mod_base = OTHER; note = 2'-O-methyl nucleotide
  modified_base 7: mod_base = OTHER; note = 2'-O-methyl nucleotide
  modified_base 8: mod_base = OTHER; note = 2'-O-methyl nucleotide
  modified_base 13: mod_base = OTHER; note = 2'-O-methyl nucleotide
  modified_base 14: mod_base = OTHER; note = 2'-O-methyl nucleotide
  modified_base 15: mod_base = OTHER; note = 2'-O-methyl nucleotide
  modified_base 16: mod_base = OTHER; note = 2'-O-methyl nucleotide
  modified_base 17: mod_base = OTHER; note = 2'-O-methyl nucleotide
  modified_base 18: mod_base = OTHER; note = 2'-O-methyl nucleotide
  modified_base 19: mod_base = OTHER; note = 2'-O-methyl nucleotide
  modified_base 20: mod_base = OTHER; note = 2'-O-methyl nucleotide
  modified_base 21: mod_base = OTHER; note = 2'-O-methyl nucleotide
  modified_base 22: mod_base = OTHER; note = 2'-O-methyl nucleotide
  modified_base 23: mod_base = OTHER; note = 2'-O-methyl nucleotide
  modified_base 27: mod_base = OTHER; note = 2'-O-methyl nucleotide
  modified_base 28: mod_base = OTHER; note = 2'-O-methyl nucleotide
  modified_base 31: mod_base = OTHER; note = 2'-O-methyl nucleotide
  modified_base 38: mod_base = OTHER; note = 2'-O-methyl nucleotide
  modified_base 39: mod_base = OTHER; note = 2'-O-methyl nucleotide
  modified_base 41: mod_base = OTHER; note = 2'-O-methyl nucleotide
  modified_base 42: mod_base = OTHER; note = 2'-O-methyl nucleotide
  modified_base 43: mod_base = OTHER; note = 2'-O-methyl nucleotide
  modified_base 44: mod_base = OTHER; note = 2'-O-methyl nucleotide
  modified_base 45: mod_base = OTHER; note = 2'-O-methyl nucleotide
  modified_base 46: mod_base = OTHER; note = 2'-O-methyl nucleotide
  modified_base 47: mod_base = OTHER; note = 2'-O-methyl nucleotide
  modified_base 48: mod_base = OTHER; note = 2'-O-methyl nucleotide
  modified_base 49: mod_base = OTHER; note = 2'-O-methyl nucleotide
  modified_base 50: mod_base = OTHER; note = 2'-O-methyl nucleotide
  modified_base 55: mod_base = OTHER; note = 2'-O-methyl nucleotide
  modified_base 57: mod_base = OTHER; note = 2'-O-methyl nucleotide
  modified_base 60: mod_base = OTHER; note = 2'-O-methyl nucleotide
  modified_base 66: mod_base = OTHER; note = 2'-O-methyl nucleotide
  modified_base 67: mod_base = OTHER; note = 2'-O-methyl nucleotide
  modified_base 69: mod_base = OTHER; note = 2'-O-methyl nucleotide
  modified_base 70: mod_base = OTHER; note = 2'-O-methyl nucleotide
  modified_base 71: mod_base = OTHER; note = 2'-O-methyl nucleotide
  modified_base 72: mod_base = OTHER; note = 2'-O-methyl nucleotide
  modified_base 79: mod_base = OTHER; note = phosphorothioate linkage
  modified_base 80: mod_base = OTHER; note = 2'-O-methyl nucleotide, phosphorothioate linkage
  modified_base 81: mod_base = OTHER; note = 2'-O-methyl nucleotide
  source 1..81: mol_type = other RNA

SEQ ID NO: 718 - RNA, 81 nt, synthetic construct; identical to SEQ ID NO: 707
  misc_feature 1..81: note = Synthetic
  modified_base 1: mod_base = OTHER; note = 2'-O-methyl nucleotide
  modified_base 5: mod_base = OTHER; note = 2'-O-methyl nucleotide
  modified_base 6: mod_base = OTHER; note = 2'-O-methyl nucleotide
  modified_base 7: mod_base = OTHER; note = 2'-O-methyl nucleotide
  modified_base 8: mod_base = OTHER; note = 2'-O-methyl nucleotide
  modified_base 13: mod_base = OTHER; note = 2'-O-methyl nucleotide
  modified_base 14: mod_base = OTHER; note = 2'-O-methyl nucleotide
  modified_base 15: mod_base = OTHER; note = 2'-O-methyl nucleotide
  modified_base 16: mod_base = OTHER; note = 2'-O-methyl nucleotide
  modified_base 17: mod_base = OTHER; note = 2'-O-methyl nucleotide
  modified_base 18: mod_base = OTHER; note = 2'-O-methyl nucleotide
  modified_base 19: mod_base = OTHER; note = 2'-O-methyl nucleotide
  modified_base 20: mod_base = OTHER; note = 2'-O-methyl nucleotide
  modified_base 21: mod_base = OTHER; note = 2'-O-methyl nucleotide
  modified_base 22: mod_base = OTHER; note = 2'-O-methyl nucleotide
  modified_base 23: mod_base = OTHER; note = 2'-O-methyl nucleotide
  modified_base 27: mod_base = OTHER; note = 2'-O-methyl nucleotide
  modified_base 28: mod_base = OTHER; note = 2'-O-methyl nucleotide
  modified_base 31: mod_base = OTHER; note = 2'-O-methyl nucleotide
  modified_base 34: mod_base = OTHER; note = phosphorothioate linkage
  modified_base 38: mod_base = OTHER; note = 2'-O-methyl nucleotide
  modified_base 39: mod_base = OTHER; note = 2'-O-methyl nucleotide
  modified_base 41: mod_base = OTHER; note = 2'-O-methyl nucleotide
  modified_base 42: mod_base = OTHER; note = 2'-O-methyl nucleotide
  modified_base 43: mod_base = OTHER; note = 2'-O-methyl nucleotide
  modified_base 44: mod_base = OTHER; note = 2'-O-methyl nucleotide
  modified_base 45: mod_base = OTHER; note = 2'-O-methyl nucleotide
  modified_base 46: mod_base = OTHER; note = 2'-O-methyl nucleotide
  modified_base 47: mod_base = OTHER; note = 2'-O-methyl nucleotide
  modified_base 48: mod_base = OTHER; note = 2'-O-methyl nucleotide
  modified_base 49: mod_base = OTHER; note = 2'-O-methyl nucleotide
  modified_base 50: mod_base = OTHER; note = 2'-O-methyl nucleotide
  modified_base 55: mod_base = OTHER; note = 2'-O-methyl nucleotide
  modified_base 57: mod_base = OTHER; note = 2'-O-methyl nucleotide
  modified_base 60: mod_base = OTHER; note = 2'-O-methyl nucleotide
  modified_base 62: mod_base = OTHER; note = 2'-O-methyl nucleotide
  modified_base 63: mod_base = OTHER; note = 2'-O-methyl nucleotide
  modified_base 64: mod_base = OTHER; note = 2'-O-methyl nucleotide
  modified_base 65: mod_base = OTHER; note = 2'-O-methyl nucleotide
  modified_base 66: mod_base = OTHER; note = 2'-O-methyl nucleotide
  modified_base 67: mod_base = OTHER; note = 2'-O-methyl nucleotide
  modified_base 69: mod_base = OTHER; note = 2'-O-methyl nucleotide
  modified_base 70: mod_base = OTHER; note = 2'-O-methyl nucleotide
  modified_base 71: mod_base = OTHER; note = 2'-O-methyl nucleotide
  modified_base 72: mod_base = OTHER; note = 2'-O-methyl nucleotide
  modified_base 79: mod_base = OTHER; note = phosphorothioate linkage
  modified_base 80: mod_base = OTHER; note = 2'-O-methyl nucleotide, phosphorothioate linkage
  modified_base 81: mod_base = OTHER; note = 2'-O-methyl nucleotide
  source 1..81: mol_type = other RNA

SEQ ID NO: 719 - RNA, 81 nt, synthetic construct; identical to SEQ ID NO: 707
  misc_feature 1..81: note = Synthetic
  modified_base 1: mod_base = OTHER; note = 2'-O-methyl nucleotide
  modified_base 5: mod_base = OTHER; note = 2'-O-methyl nucleotide
  modified_base 6: mod_base = OTHER; note = 2'-O-methyl nucleotide
  modified_base 7: mod_base = OTHER; note = 2'-O-methyl nucleotide
  modified_base 8: mod_base = OTHER; note = 2'-O-methyl nucleotide
  modified_base 13: mod_base = OTHER; note = 2'-O-methyl nucleotide
  modified_base 14: mod_base = OTHER; note = 2'-O-methyl nucleotide
  modified_base 15: mod_base = OTHER; note = 2'-O-methyl nucleotide
  modified_base 16: mod_base = OTHER; note = 2'-O-methyl nucleotide
  modified_base 17: mod_base = OTHER; note = 2'-O-methyl nucleotide
  modified_base 18: mod_base = OTHER; note = 2'-O-methyl nucleotide
  modified_base 19: mod_base = OTHER; note = 2'-O-methyl nucleotide
  modified_base 20: mod_base = OTHER; note = 2'-O-methyl nucleotide
  modified_base 21: mod_base = OTHER; note = 2'-O-methyl nucleotide
  modified_base 22: mod_base = OTHER; note = 2'-O-methyl nucleotide
  modified_base 23: mod_base = OTHER; note = 2'-O-methyl nucleotide
  modified_base 27: mod_base = OTHER; note = 2'-O-methyl nucleotide
  modified_base 28: mod_base = OTHER; note = 2'-O-methyl nucleotide
  modified_base 31: mod_base = OTHER; note = 2'-O-methyl nucleotide
  modified_base 38: mod_base = OTHER; note = 2'-O-methyl nucleotide
  modified_base 39: mod_base = OTHER; note = 2'-O-methyl nucleotide
  modified_base 41: mod_base = OTHER; note = 2'-O-methyl nucleotide
  modified_base 42: mod_base = OTHER; note = 2'-O-methyl nucleotide
  modified_base 43: mod_base = OTHER; note = 2'-O-methyl nucleotide
  modified_base 44: mod_base = OTHER; note = 2'-O-methyl nucleotide
  modified_base 45: mod_base = OTHER; note = 2'-O-methyl nucleotide
  modified_base 46: mod_base = OTHER; note = 2'-O-methyl nucleotide
  modified_base 47: mod_base = OTHER; note = 2'-O-methyl nucleotide
  modified_base 48: mod_base = OTHER; note = 2'-O-methyl nucleotide
  modified_base 49: mod_base = OTHER; note = 2'-O-methyl nucleotide
  modified_base 50: mod_base = OTHER; note = 2'-O-methyl nucleotide
  modified_base 55: mod_base = OTHER; note = 2'-O-methyl nucleotide
  modified_base 57: mod_base = OTHER; note = 2'-O-methyl nucleotide
  modified_base 60: mod_base = OTHER; note = 2'-O-methyl nucleotide
  modified_base 62: mod_base = OTHER; note = 2'-O-methyl nucleotide
  modified_base 63: mod_base = OTHER; note = 2'-O-methyl nucleotide
  modified_base 64: mod_base = OTHER; note = 2'-O-methyl nucleotide
  modified_base 65: mod_base = OTHER; note = 2'-O-methyl nucleotide
  modified_base 66: mod_base = OTHER; note = 2'-O-methyl nucleotide
  modified_base 67: mod_base = OTHER; note = 2'-O-methyl nucleotide
  modified_base 69: mod_base = OTHER; note = 2'-O-methyl nucleotide
  modified_base 70: mod_base = OTHER; note = 2'-O-methyl nucleotide
  modified_base 71: mod_base = OTHER; note = 2'-O-methyl nucleotide
  modified_base 72: mod_base = OTHER; note = 2'-O-methyl nucleotide
  modified_base 79: mod_base = OTHER; note = phosphorothioate linkage
  modified_base 80: mod_base = OTHER; note = 2'-O-methyl nucleotide, phosphorothioate linkage
  modified_base 81: mod_base = OTHER; note = 2'-O-methyl nucleotide
  source 1..81: mol_type = other RNA

SEQ ID NO: 720 - RNA, 101 nt, synthetic construct
  misc_feature 1..101: note = Synthetic
  variation 1..24: note = n is a, c, g, or u
  modified_base 1: mod_base = OTHER; note = 2'-O-methyl nucleotide, phosphorothioate linkage
  modified_base 2: mod_base = OTHER; note = 2'-O-methyl nucleotide
  modified_base 10: mod_base = OTHER; note = 2'-O-methyl nucleotide
  modified_base 13: mod_base = OTHER; note = 2'-O-methyl nucleotide
  modified_base 25: mod_base = OTHER; note = 2'-O-methyl nucleotide
  modified_base 29: mod_base = OTHER; note = 2'-O-methyl nucleotide
  modified_base 30: mod_base = OTHER; note = 2'-O-methyl nucleotide
  modified_base 31: mod_base = OTHER; note = 2'-O-methyl nucleotide
  modified_base 32: mod_base = OTHER; note = 2'-O-methyl nucleotide
  modified_base 37: mod_base = OTHER; note = 2'-O-methyl nucleotide
  modified_base 38: mod_base = OTHER; note = 2'-O-methyl nucleotide
  modified_base 39: mod_base = OTHER; note = 2'-O-methyl nucleotide
  modified_base 40: mod_base = OTHER; note = 2'-O-methyl nucleotide
  modified_base 41: mod_base = OTHER; note = 2'-O-methyl nucleotide
  modified_base 42: mod_base = OTHER; note = 2'-O-methyl nucleotide
  modified_base 43: mod_base = OTHER; note = 2'-O-methyl nucleotide
  modified_base 47: mod_base = OTHER; note = 2'-O-methyl nucleotide
  modified_base 48: mod_base = OTHER; note = 2'-O-methyl nucleotide
  modified_base 51: mod_base = OTHER; note = 2'-O-methyl nucleotide
  modified_base 54: mod_base = OTHER; note = phosphorothioate linkage
  modified_base 58: mod_base = OTHER; note = 2'-O-methyl nucleotide
  modified_base 59: mod_base = OTHER; note = 2'-O-methyl nucleotide
  modified_base 61: mod_base = OTHER; note = 2'-O-methyl nucleotide
  modified_base 62: mod_base = OTHER; note = 2'-O-methyl nucleotide
  modified_base 63: mod_base = OTHER; note = 2'-O-methyl nucleotide
  modified_base 64: mod_base = OTHER; note = 2'-O-methyl nucleotide
  modified_base 65: mod_base = OTHER; note = 2'-O-methyl nucleotide
  modified_base 66: mod_base = OTHER; note = 2'-O-methyl nucleotide
  modified_base 67: mod_base = OTHER; note = 2'-O-methyl nucleotide
  modified_base 68: mod_base = OTHER; note = 2'-O-methyl nucleotide
  modified_base 69: mod_base = OTHER; note = 2'-O-methyl nucleotide
  modified_base 70: mod_base = OTHER; note = 2'-O-methyl nucleotide
  modified_base 75: mod_base = OTHER; note = 2'-O-methyl nucleotide
  modified_base 78: mod_base = OTHER; note = 2'-O-methyl nucleotide
  modified_base 79: mod_base = OTHER; note = 2'-O-methyl nucleotide
  modified_base 80: mod_base = OTHER; note = 2'-O-methyl nucleotide
  modified_base 81: mod_base = OTHER; note = 2'-O-methyl nucleotide
  modified_base 86: mod_base = OTHER; note = 2'-O-methyl nucleotide
  modified_base 87: mod_base = OTHER; note = 2'-O-methyl nucleotide
  modified_base 89: mod_base = OTHER; note = 2'-O-methyl nucleotide
  modified_base 90: mod_base = OTHER; note = 2'-O-methyl nucleotide
  modified_base 91: mod_base = OTHER; note = 2'-O-methyl nucleotide
  modified_base 92: mod_base = OTHER; note = 2'-O-methyl nucleotide
  modified_base 94: mod_base = OTHER; note = 2'-O-methyl nucleotide
  modified_base 96: mod_base = OTHER; note = 2'-O-methyl nucleotide
  modified_base 97: mod_base = OTHER; note = 2'-O-methyl nucleotide
  modified_base 98: mod_base = OTHER; note = phosphorothioate linkage
  modified_base 99: mod_base = OTHER; note = 2'-O-methyl nucleotide, phosphorothioate linkage
  modified_base 100: mod_base = OTHER; note = 2'-O-methyl nucleotide, phosphorothioate linkage
  modified_base 101: mod_base = OTHER; note = 2'-O-methyl nucleotide
  source 1..101: mol_type = other RNA
nnnnnnnnnnnnnnnnnnnnnnnngttgtagctccctgaaaccgttgctacaataaggccgtcgaaagatgtgccgcaacgctctgccttctggcatcgtt

SEQ ID NO: 721 - RNA, 102 nt, synthetic construct; identical to SEQ ID NO: 702
  misc_feature 1..102: note = Synthetic
  variation 1..25: note = n is a, c, g, or u
  variation 21..25: note = n may be present or absent
  modified_base 26: mod_base = OTHER; note = 2'-O-methyl nucleotide
  modified_base 30: mod_base = OTHER; note = 2'-O-methyl nucleotide
  modified_base 31: mod_base = OTHER; note = 2'-O-methyl nucleotide
  modified_base 32: mod_base = OTHER; note = 2'-O-methyl nucleotide
  modified_base 33: mod_base = OTHER; note = 2'-O-methyl nucleotide
  modified_base 38: mod_base = OTHER; note = 2'-O-methyl nucleotide
  modified_base 39: mod_base = OTHER; note = 2'-O-methyl nucleotide
  modified_base 40: mod_base = OTHER; note = 2'-O-methyl nucleotide
  modified_base 41: mod_base = OTHER; note = 2'-O-methyl nucleotide
  modified_base 42: mod_base = OTHER; note = 2'-O-methyl nucleotide
  modified_base 43: mod_base = OTHER; note = 2'-O-methyl nucleotide
  modified_base 44: mod_base = OTHER; note = 2'-O-methyl nucleotide
  modified_base 48: mod_base = OTHER; note = 2'-O-methyl nucleotide
  modified_base 49: mod_base = OTHER; note = 2'-O-methyl nucleotide
  modified_base 52: mod_base = OTHER; note = 2'-O-methyl nucleotide
  modified_base 55: mod_base = OTHER; note = 2'-O-methyl nucleotide, phosphorothioate linkage
  modified_base 59: mod_base = OTHER; note = 2'-O-methyl nucleotide
  modified_base 60: mod_base = OTHER; note = 2'-O-methyl nucleotide
  modified_base 62: mod_base = OTHER; note = 2'-O-methyl nucleotide
  modified_base 63: mod_base = OTHER; note = 2'-O-methyl nucleotide
  modified_base 64: mod_base = OTHER; note = 2'-O-methyl nucleotide
  modified_base 65: mod_base = OTHER; note = 2'-O-methyl nucleotide
  modified_base 66: mod_base = OTHER; note = 2'-O-methyl nucleotide
  modified_base 67: mod_base = OTHER; note = 2'-O-methyl nucleotide
  modified_base 68: mod_base = OTHER; note = 2'-O-methyl nucleotide
  modified_base 69: mod_base = OTHER; note = 2'-O-methyl nucleotide
  modified_base 70: mod_base = OTHER; note = 2'-O-methyl nucleotide
  modified_base 71: mod_base = OTHER; note = 2'-O-methyl nucleotide
  modified_base 76: mod_base = OTHER; note = 2'-O-methyl nucleotide
  modified_base 78: mod_base = OTHER; note = 2'-O-methyl nucleotide
  modified_base 81: mod_base = OTHER; note = 2'-O-methyl nucleotide
  modified_base 87: mod_base = OTHER; note = 2'-O-methyl nucleotide
  modified_base 88: mod_base = OTHER; note = 2'-O-methyl nucleotide
  modified_base 90: mod_base = OTHER; note = 2'-O-methyl nucleotide
  modified_base 91: mod_base = OTHER; note = 2'-O-methyl nucleotide
  modified_base 92: mod_base = OTHER; note = 2'-O-methyl nucleotide
  modified_base 93: mod_base = OTHER; note = 2'-O-methyl nucleotide
  modified_base 100: mod_base = OTHER; note = phosphorothioate linkage
  modified_base 101: mod_base = OTHER; note = 2'-O-methyl nucleotide, phosphorothioate linkage
  modified_base 102: mod_base = OTHER; note = 2'-O-methyl nucleotide
  source 1..102: mol_type = other RNA

SEQ ID NO: 722 - RNA, 102 nt, synthetic construct; identical to SEQ ID NO: 702
  misc_feature 1..102: note = Synthetic
  variation 1..25: note = n is a, c, g, or u
  variation 21..25: note = n may be present or absent
  modified_base 26: mod_base = OTHER; note = 2'-O-methyl nucleotide
  modified_base 30: mod_base = OTHER; note = 2'-O-methyl nucleotide
  modified_base 31: mod_base = OTHER; note = 2'-O-methyl nucleotide
  modified_base 32: mod_base = OTHER; note = 2'-O-methyl nucleotide
  modified_base 33: mod_base = OTHER; note = 2'-O-methyl nucleotide
  modified_base 38: mod_base = OTHER; note = 2'-O-methyl nucleotide
  modified_base 39: mod_base = OTHER; note = 2'-O-methyl nucleotide
  modified_base 40: mod_base = OTHER; note = 2'-O-methyl nucleotide
  modified_base 41: mod_base = OTHER; note = 2'-O-methyl nucleotide
  modified_base 42: mod_base = OTHER; note = 2'-O-methyl nucleotide
  modified_base 43: mod_base = OTHER; note = 2'-O-methyl nucleotide
  modified_base 44: mod_base = OTHER; note = 2'-O-methyl nucleotide
  modified_base 48: mod_base = OTHER; note = 2'-O-methyl nucleotide
  modified_base 49: mod_base = OTHER; note = 2'-O-methyl nucleotide
  modified_base 52: mod_base = OTHER; note = 2'-O-methyl nucleotide
  modified_base 59: mod_base = OTHER; note = 2'-O-methyl nucleotide
  modified_base 60: mod_base = OTHER; note = 2'-O-methyl nucleotide
  modified_base 62: mod_base = OTHER; note = 2'-O-methyl nucleotide
  modified_base 63: mod_base = OTHER; note = 2'-O-methyl nucleotide
  modified_base 64: mod_base = OTHER; note = 2'-O-methyl nucleotide
  modified_base 65: mod_base = OTHER; note = 2'-O-methyl nucleotide
  modified_base 66: mod_base = OTHER; note = 2'-O-methyl nucleotide
  modified_base 67: mod_base = OTHER; note = 2'-O-methyl nucleotide
  modified_base 68: mod_base = OTHER; note = 2'-O-methyl nucleotide
  modified_base 69: mod_base = OTHER; note = 2'-O-methyl nucleotide
  modified_base 70: mod_base = OTHER; note = 2'-O-methyl nucleotide
  modified_base 71: mod_base = OTHER; note = 2'-O-methyl nucleotide
  modified_base 76: mod_base = OTHER; note = 2'-O-methyl nucleotide
  modified_base 78: mod_base = OTHER; note = 2'-O-methyl nucleotide
  modified_base 81: mod_base = OTHER; note = 2'-O-methyl nucleotide
  modified_base 87: mod_base = OTHER; note = 2'-O-methyl nucleotide
  modified_base 88: mod_base = OTHER; note = 2'-O-methyl nucleotide
  modified_base 90: mod_base = OTHER; note = 2'-O-methyl nucleotide
  modified_base 91: mod_base = OTHER; note = 2'-O-methyl nucleotide
  modified_base 92: mod_base = OTHER; note = 2'-O-methyl nucleotide
  modified_base 93: mod_base = OTHER; note = 2'-O-methyl nucleotide
  modified_base 100: mod_base = OTHER; note = phosphorothioate linkage
  modified_base 101: mod_base = OTHER; note = 2'-O-methyl nucleotide, phosphorothioate linkage
  modified_base 102: mod_base = OTHER; note = 2'-O-methyl nucleotide
  source 1..102: mol_type = other RNA

SEQ ID NO: 723 - RNA, 102 nt, synthetic construct; identical to SEQ ID NO: 702
  misc_feature 1..102: note = Synthetic
  variation 1..25: note = n is a, c, g, or u
  variation 21..25: note = n may be present or absent
  modified_base 26: mod_base = OTHER; note = 2'-O-methyl nucleotide
  modified_base 30: mod_base = OTHER; note = 2'-O-methyl nucleotide
  modified_base 31: mod_base = OTHER; note = 2'-O-methyl nucleotide
  modified_base 32: mod_base = OTHER; note = 2'-O-methyl nucleotide
  modified_base 33: mod_base = OTHER; note = 2'-O-methyl nucleotide
  modified_base 38: mod_base = OTHER; note = 2'-O-methyl nucleotide
  modified_base 39: mod_base = OTHER; note = 2'-O-methyl nucleotide
  modified_base 40: mod_base = OTHER; note = 2'-O-methyl nucleotide
  modified_base 41: mod_base = OTHER; note = 2'-O-methyl nucleotide
  modified_base 42: mod_base = OTHER; note = 2'-O-methyl nucleotide
  modified_base 43: mod_base = OTHER; note = 2'-O-methyl nucleotide
  modified_base 44: mod_base = OTHER; note = 2'-O-methyl nucleotide
  modified_base 48: mod_base = OTHER; note = 2'-O-methyl nucleotide
  modified_base 49: mod_base = OTHER; note = 2'-O-methyl nucleotide
  modified_base 52: mod_base = OTHER; note = 2'-O-methyl nucleotide
  modified_base 55: mod_base = OTHER; note = phosphorothioate linkage
  modified_base 59: mod_base = OTHER; note = 2'-O-methyl nucleotide
  modified_base 60: mod_base = OTHER; note = 2'-O-methyl nucleotide
  modified_base 62: mod_base = OTHER; note = 2'-O-methyl nucleotide
  modified_base 63: mod_base = OTHER; note = 2'-O-methyl nucleotide
  modified_base 64: mod_base = OTHER; note = 2'-O-methyl nucleotide
  modified_base 65: mod_base = OTHER; note = 2'-O-methyl nucleotide
  modified_base 66: mod_base = OTHER; note = 2'-O-methyl nucleotide
  modified_base 67: mod_base = OTHER; note = 2'-O-methyl nucleotide
  modified_base 68: mod_base = OTHER; note = 2'-O-methyl nucleotide
  modified_base 69: mod_base = OTHER; note = 2'-O-methyl nucleotide
  modified_base 70: mod_base = OTHER; note = 2'-O-methyl nucleotide
  modified_base 71: mod_base = OTHER; note = 2'-O-methyl nucleotide
  modified_base 76: mod_base = OTHER; note = 2'-O-methyl nucleotide
  modified_base 78: mod_base = OTHER; note = 2'-O-methyl nucleotide
  modified_base 81: mod_base = OTHER; note = 2'-O-methyl nucleotide
  modified_base 83: mod_base = OTHER; note = 2'-O-methyl nucleotide
  modified_base 84: mod_base = OTHER; note = 2'-O-methyl nucleotide
  modified_base 85: mod_base = OTHER; note = 2'-O-methyl nucleotide
  modified_base 86: mod_base = OTHER; note = 2'-O-methyl nucleotide
  modified_base 87: mod_base = OTHER; note = 2'-O-methyl nucleotide
  modified_base 88: mod_base = OTHER; note = 2'-O-methyl nucleotide
  modified_base 90: mod_base = OTHER; note = 2'-O-methyl nucleotide
  modified_base 91: mod_base = OTHER; note = 2'-O-methyl nucleotide
  modified_base 92: mod_base = OTHER; note = 2'-O-methyl nucleotide
  modified_base 93: mod_base = OTHER; note = 2'-O-methyl nucleotide
  modified_base 100: mod_base = OTHER; note = phosphorothioate linkage
  modified_base 101: mod_base = OTHER; note = 2'-O-methyl nucleotide, phosphorothioate linkage
  modified_base 102: mod_base = OTHER; note = 2'-O-methyl nucleotide
  source 1..102: mol_type = other RNA

SEQ ID NO: 724 - RNA, 102 nt, synthetic construct; identical to SEQ ID NO: 702
  misc_feature 1..102: note = Synthetic
  variation 1..25: note = n is a, c, g, or u
  variation 21..25: note = n may be present or absent
  modified_base 26: mod_base = OTHER; note = 2'-O-methyl nucleotide
  modified_base 30: mod_base = OTHER; note = 2'-O-methyl nucleotide
  modified_base 31: mod_base = OTHER; note = 2'-O-methyl nucleotide
  modified_base 32: mod_base = OTHER; note = 2'-O-methyl nucleotide
  modified_base 33: mod_base = OTHER; note = 2'-O-methyl nucleotide
  modified_base 38: mod_base = OTHER; note = 2'-O-methyl nucleotide
  modified_base 39: mod_base = OTHER; note = 2'-O-methyl nucleotide
  modified_base 40: mod_base = OTHER; note = 2'-O-methyl nucleotide
  modified_base 41: mod_base = OTHER; note = 2'-O-methyl nucleotide
  modified_base 42: mod_base = OTHER; note = 2'-O-methyl nucleotide
  modified_base 43: mod_base = OTHER; note = 2'-O-methyl nucleotide
  modified_base 44: mod_base = OTHER; note = 2'-O-methyl nucleotide
  modified_base 48: mod_base = OTHER; note = 2'-O-methyl nucleotide
  modified_base 49: mod_base = OTHER; note = 2'-O-methyl nucleotide
  modified_base 52: mod_base = OTHER; note = 2'-O-methyl nucleotide
  modified_base 59: mod_base = OTHER; note = 2'-O-methyl nucleotide
  modified_base 60: mod_base = OTHER; note = 2'-O-methyl nucleotide
  modified_base 62: mod_base = OTHER; note = 2'-O-methyl nucleotide
  modified_base 63: mod_base = OTHER; note = 2'-O-methyl nucleotide
  modified_base 64: mod_base = OTHER; note = 2'-O-methyl nucleotide
  modified_base 65: mod_base = OTHER; note = 2'-O-methyl nucleotide
  modified_base 66: mod_base = OTHER; note = 2'-O-methyl nucleotide
  modified_base 67: mod_base = OTHER; note = 2'-O-methyl nucleotide
  modified_base 68: mod_base = OTHER; note = 2'-O-methyl nucleotide
  modified_base 69: mod_base = OTHER; note = 2'-O-methyl nucleotide
  modified_base 70: mod_base = OTHER; note = 2'-O-methyl nucleotide
  modified_base 71: mod_base = OTHER; note = 2'-O-methyl nucleotide
  modified_base 76: mod_base = OTHER; note = 2'-O-methyl nucleotide
  modified_base 78: mod_base = OTHER; note = 2'-O-methyl nucleotide
  modified_base 81: mod_base = OTHER; note = 2'-O-methyl nucleotide
  modified_base 83: mod_base = OTHER; note = 2'-O-methyl nucleotide
  modified_base 84: mod_base = OTHER; note = 2'-O-methyl nucleotide
  modified_base 85: mod_base = OTHER; note = 2'-O-methyl nucleotide
  modified_base 86: mod_base = OTHER; note = 2'-O-methyl nucleotide
  modified_base 87: mod_base = OTHER; note = 2'-O-methyl nucleotide
  modified_base 88: mod_base = OTHER; note = 2'-O-methyl nucleotide
  modified_base 90: mod_base = OTHER; note = 2'-O-methyl nucleotide
  modified_base 91: mod_base = OTHER; note = 2'-O-methyl nucleotide
  modified_base 92: mod_base = OTHER; note = 2'-O-methyl nucleotide
  modified_base 93: mod_base = OTHER; note = 2'-O-methyl nucleotide
  modified_base 100: mod_base = OTHER; note = phosphorothioate linkage
  modified_base 101: mod_base = OTHER; note = 2'-O-methyl nucleotide, phosphorothioate linkage
  modified_base 102: mod_base = OTHER; note = 2'-O-methyl nucleotide
  source 1..102: mol_type = other RNA

SEQ ID NO: 725 - RNA, 106 nt, synthetic construct; identical to SEQ ID NO: 703
  misc_feature 1..106: note = Synthetic
  variation 1..25: note = n is a, c, g, or u
  variation 21..25: note = n may be present or absent
  modified_base 26: mod_base = OTHER; note = 2'-O-methyl nucleotide
  modified_base 30: mod_base = OTHER; note = 2'-O-methyl nucleotide
  modified_base 31: mod_base = OTHER; note = 2'-O-methyl nucleotide
  modified_base 32: mod_base = OTHER; note = 2'-O-methyl nucleotide
  modified_base 33: mod_base = OTHER; note = 2'-O-methyl nucleotide
  modified_base 38: mod_base = OTHER; note = 2'-O-methyl nucleotide
  modified_base 39: mod_base = OTHER; note = 2'-O-methyl nucleotide
  modified_base 40: mod_base = OTHER; note = 2'-O-methyl nucleotide
  modified_base 41: mod_base = OTHER; note = 2'-O-methyl nucleotide
  modified_base 42: mod_base = OTHER; note = 2'-O-methyl nucleotide
  modified_base 43: mod_base = OTHER; note = 2'-O-methyl nucleotide
  modified_base 44: mod_base = OTHER; note = 2'-O-methyl nucleotide
  modified_base 45: mod_base = OTHER; note = 2'-O-methyl nucleotide
  modified_base 46: mod_base = OTHER; note = 2'-O-methyl nucleotide
  modified_base 47: mod_base = OTHER; note = 2'-O-methyl nucleotide
  modified_base 48: mod_base = OTHER; note = 2'-O-methyl nucleotide
  modified_base 52: mod_base = OTHER; note = 2'-O-methyl nucleotide
  modified_base 53: mod_base = OTHER; note = 2'-O-methyl nucleotide
  modified_base 56: mod_base = OTHER; note = 2'-O-methyl nucleotide
  modified_base 59: mod_base = OTHER; note = phosphorothioate linkage
  modified_base 63: mod_base = OTHER; note = 2'-O-methyl nucleotide
  modified_base 64: mod_base = OTHER; note = 2'-O-methyl nucleotide
  modified_base 66: mod_base = OTHER; note = 2'-O-methyl nucleotide
  modified_base 67: mod_base = OTHER; note = 2'-O-methyl nucleotide
  modified_base 68: mod_base = OTHER; note = 2'-O-methyl nucleotide
  modified_base 69: mod_base = OTHER; note = 2'-O-methyl nucleotide
  modified_base 70: mod_base = OTHER; note = 2'-O-methyl nucleotide
  modified_base 71: mod_base = OTHER; note = 2'-O-methyl nucleotide
  modified_base 72: mod_base = OTHER; note = 2'-O-methyl nucleotide
  modified_base 73: mod_base = OTHER; note = 2'-O-methyl nucleotide
  modified_base 74: mod_base = OTHER; note = 2'-O-methyl nucleotide
  modified_base 75: mod_base = OTHER; note = 2'-O-methyl nucleotide
  modified_base 80: mod_base = OTHER; note = 2'-O-methyl nucleotide
  modified_base 82: mod_base = OTHER; note = 2'-O-methyl nucleotide
  modified_base 85: mod_base = OTHER; note = 2'-O-methyl nucleotide
  modified_base 91: mod_base = OTHER; note = 2'-O-methyl nucleotide
  modified_base 92: mod_base = OTHER; note = 2'-O-methyl nucleotide
  modified_base 94: mod_base = OTHER; note = 2'-O-methyl nucleotide
  modified_base 95: mod_base = OTHER; note = 2'-O-methyl nucleotide
  modified_base 96: mod_base = OTHER; note = 2'-O-methyl nucleotide
  modified_base 97: mod_base = OTHER; note = 2'-O-methyl nucleotide
  modified_base 104: mod_base = OTHER; note = phosphorothioate linkage
  modified_base 105: mod_base = OTHER; note = 2'-O-methyl nucleotide, phosphorothioate linkage
  modified_base 106: mod_base = OTHER; note = 2'-O-methyl nucleotide
  source 1..106: mol_type = other RNA

SEQ ID NO: 726 - RNA, 106 nt, synthetic construct; identical to SEQ ID NO: 703
  misc_feature 1..106: note = Synthetic
  variation 1..25: note = n is a, c, g, or u
  variation 21..25: note = n may be present or absent
  modified_base 26: mod_base = OTHER; note = 2'-O-methyl nucleotide
  modified_base 30: mod_base = OTHER; note = 2'-O-methyl nucleotide
  modified_base 31: mod_base = OTHER; note = 2'-O-methyl nucleotide
  modified_base 32: mod_base = OTHER; note = 2'-O-methyl nucleotide
  modified_base 33: mod_base = OTHER; note = 2'-O-methyl nucleotide
  modified_base 38: mod_base = OTHER; note = 2'-O-methyl nucleotide
  modified_base 39: mod_base = OTHER; note = 2'-O-methyl nucleotide
  modified_base 40: mod_base = OTHER; note = 2'-O-methyl nucleotide
  modified_base 41: mod_base = OTHER; note = 2'-O-methyl nucleotide
  modified_base 42: mod_base = OTHER; note = 2'-O-methyl nucleotide
  modified_base 43: mod_base = OTHER; note = 2'-O-methyl nucleotide
  modified_base 44: mod_base = OTHER; note = 2'-O-methyl nucleotide
  modified_base 45: mod_base = OTHER; note = 2'-O-methyl nucleotide
  modified_base 46: mod_base = OTHER; note = 2'-O-methyl nucleotide
  modified_base 47: mod_base = OTHER; note = 2'-O-methyl nucleotide
  modified_base 48: mod_base = OTHER; note = 2'-O-methyl nucleotide
  modified_base 52: mod_base = OTHER; note = 2'-O-methyl nucleotide
  modified_base 53: mod_base = OTHER; note = 2'-O-methyl nucleotide
  modified_base 56: mod_base = OTHER; note = 2'-O-methyl nucleotide
  modified_base 63: mod_base = OTHER; note = 2'-O-methyl nucleotide
  modified_base 64: mod_base = OTHER; note = 2'-O-methyl nucleotide
  modified_base 66: mod_base = OTHER; note = 2'-O-methyl nucleotide
  modified_base 67: mod_base = OTHER; note = 2'-O-methyl nucleotide
  modified_base 68: mod_base = OTHER; note = 2'-O-methyl nucleotide
  modified_base 69: mod_base = OTHER; note = 2'-O-methyl nucleotide
  modified_base 70: mod_base = OTHER; note = 2'-O-methyl nucleotide
  modified_base 71: mod_base = OTHER; note = 2'-O-methyl nucleotide
  modified_base 72: mod_base = OTHER; note = 2'-O-methyl nucleotide
  modified_base 73: mod_base = OTHER; note = 2'-O-methyl nucleotide
  modified_base 74: mod_base = OTHER; note = 2'-O-methyl nucleotide
  modified_base 75: mod_base = OTHER; note = 2'-O-methyl nucleotide
  modified_base 80: mod_base = OTHER; note = 2'-O-methyl nucleotide
  modified_base 82: mod_base = OTHER; note = 2'-O-methyl nucleotide
  modified_base 85: mod_base = OTHER; note = 2'-O-methyl nucleotide
  modified_base 91: mod_base = OTHER; note = 2'-O-methyl nucleotide
  modified_base 92: mod_base = OTHER; note = 2'-O-methyl nucleotide
  modified_base 94: mod_base = OTHER; note = 2'-O-methyl nucleotide
  modified_base 95: mod_base = OTHER; note = 2'-O-methyl nucleotide
  modified_base 96: mod_base = OTHER; note = 2'-O-methyl nucleotide
  modified_base 97: mod_base = OTHER; note = 2'-O-methyl nucleotide
  modified_base 104: mod_base = OTHER; note = phosphorothioate linkage
  modified_base 105: mod_base = OTHER; note = 2'-O-methyl nucleotide, phosphorothioate linkage
  modified_base 106: mod_base = OTHER; note = 2'-O-methyl nucleotide
  source 1..106: mol_type = other RNA

SEQ ID NO: 727 - RNA, 106 nt, synthetic construct; identical to SEQ ID NO: 703
  misc_feature 1..106: note = Synthetic
  variation 1..25: note = n is a, c, g, or u
  variation 21..25: note = n may be present or absent
  modified_base 26: mod_base = OTHER; note = 2'-O-methyl nucleotide
  modified_base 30: mod_base = OTHER; note = 2'-O-methyl nucleotide
  modified_base 31: mod_base = OTHER; note = 2'-O-methyl nucleotide
  modified_base 32: mod_base = OTHER; note = 2'-O-methyl nucleotide
  modified_base 33: mod_base = OTHER; note = 2'-O-methyl nucleotide
  modified_base 38: mod_base = OTHER; note = 2'-O-methyl nucleotide
  modified_base 39: mod_base = OTHER; note = 2'-O-methyl nucleotide
  modified_base 40: mod_base = OTHER; note = 2'-O-methyl nucleotide
  modified_base 41: mod_base = OTHER; note = 2'-O-methyl nucleotide
  modified_base 42: mod_base = OTHER; note = 2'-O-methyl nucleotide
  modified_base 43: mod_base = OTHER; note = 2'-O-methyl nucleotide
  modified_base 44: mod_base = OTHER; note = 2'-O-methyl nucleotide
  modified_base 45: mod_base = OTHER; note = 2'-O-methyl nucleotide
  modified_base 46: mod_base = OTHER; note = 2'-O-methyl nucleotide
  modified_base 47: mod_base = OTHER; note = 2'-O-methyl nucleotide
  modified_base 48: mod_base = OTHER; note = 2'-O-methyl nucleotide
  modified_base 52: mod_base = OTHER; note = 2'-O-methyl nucleotide
  modified_base 53: mod_base = OTHER; note = 2'-O-methyl nucleotide
  modified_base 56: mod_base = OTHER; note = 2'-O-methyl nucleotide
  modified_base 59: mod_base = OTHER; note = phosphorothioate linkage
  modified_base 63: mod_base = OTHER; note = 2'-O-methyl nucleotide
  modified_base 64: mod_base = OTHER; note = 2'-O-methyl nucleotide
  modified_base 66: mod_base = OTHER; note = 2'-O-methyl nucleotide
  modified_base 67: mod_base = OTHER; note = 2'-O-methyl nucleotide
  modified_base 68: mod_base = OTHER; note = 2'-O-methyl nucleotide
  modified_base 69: mod_base = OTHER; note = 2'-O-methyl nucleotide
  modified_base 70: mod_base = OTHER; note = 2'-O-methyl nucleotide
  modified_base 71: mod_base = OTHER; note = 2'-O-methyl nucleotide
  modified_base 72: mod_base = OTHER; note = 2'-O-methyl nucleotide
  modified_base 73: mod_base = OTHER; note = 2'-O-methyl nucleotide
  modified_base 74: mod_base = OTHER; note = 2'-O-methyl nucleotide
  modified_base 75: mod_base = OTHER; note = 2'-O-methyl nucleotide
  modified_base 80: mod_base = OTHER; note = 2'-O-methyl nucleotide
  modified_base 82: mod_base = OTHER; note = 2'-O-methyl nucleotide
  modified_base 85: mod_base = OTHER; note = 2'-O-methyl nucleotide
  modified_base 87: mod_base = OTHER; note = 2'-O-methyl nucleotide
  modified_base 88: mod_base = OTHER; note = 2'-O-methyl nucleotide
  modified_base 89: mod_base = OTHER; note = 2'-O-methyl nucleotide
  modified_base 90: mod_base = OTHER; note = 2'-O-methyl nucleotide
  modified_base 91: mod_base = OTHER; note = 2'-O-methyl nucleotide
  modified_base 92: mod_base = OTHER; note = 2'-O-methyl nucleotide
  modified_base 94: mod_base = OTHER; note = 2'-O-methyl nucleotide
  modified_base 95: mod_base = OTHER; note = 2'-O-methyl nucleotide
  modified_base 96: mod_base = OTHER; note = 2'-O-methyl nucleotide
  modified_base 97: mod_base = OTHER; note = 2'-O-methyl nucleotide
  modified_base 104: mod_base = OTHER; note = phosphorothioate linkage
  modified_base 105: mod_base = OTHER; note = 2'-O-methyl nucleotide, phosphorothioate linkage
  modified_base 106: mod_base = OTHER; note = 2'-O-methyl nucleotide
  source 1..106: mol_type = other RNA

SEQ ID NO: 728 - RNA, 106 nt, synthetic construct; identical to SEQ ID NO: 703
  misc_feature 1..106: note = Synthetic
  variation 1..25: note = n is a, c, g, or u
  variation 21..25: note = n may be present or absent
  modified_base 26: mod_base = OTHER; note = 2'-O-methyl nucleotide
  modified_base 30: mod_base = OTHER; note = 2'-O-methyl nucleotide
  modified_base 31: mod_base = OTHER; note = 2'-O-methyl nucleotide
  modified_base 32: mod_base = OTHER; note = 2'-O-methyl nucleotide
  modified_base 33: mod_base = OTHER; note = 2'-O-methyl nucleotide
  modified_base 38: mod_base = OTHER; note = 2'-O-methyl nucleotide
  modified_base 39: mod_base = OTHER; note = 2'-O-methyl nucleotide
  modified_base 40: mod_base = OTHER; note = 2'-O-methyl nucleotide
  modified_base 41: mod_base = OTHER; note = 2'-O-methyl nucleotide
  modified_base 42: mod_base = OTHER; note = 2'-O-methyl nucleotide
  modified_base 43: mod_base = OTHER; note = 2'-O-methyl nucleotide
  modified_base 44: mod_base = OTHER; note = 2'-O-methyl nucleotide
  modified_base 45: mod_base = OTHER; note = 2'-O-methyl nucleotide
  modified_base 46: mod_base = OTHER; note = 2'-O-methyl nucleotide
  modified_base 47: mod_base = OTHER; note = 2'-O-methyl nucleotide
  modified_base 48: mod_base = OTHER; note = 2'-O-methyl nucleotide
  modified_base 52: mod_base = OTHER; note = 2'-O-methyl nucleotide
  modified_base 53: mod_base = OTHER; note = 2'-O-methyl nucleotide
  modified_base 56: mod_base = OTHER; note = 2'-O-methyl nucleotide
  modified_base 63: mod_base = OTHER; note = 2'-O-methyl nucleotide
  modified_base 64: mod_base = OTHER; note = 2'-O-methyl nucleotide
  modified_base 66: mod_base = OTHER; note = 2'-O-methyl nucleotide
  modified_base 67: mod_base = OTHER; note = 2'-O-methyl nucleotide
  modified_base 68: mod_base = OTHER; note = 2'-O-methyl nucleotide
  modified_base 69: mod_base = OTHER; note = 2'-O-methyl nucleotide
  modified_base 70: mod_base = OTHER; note = 2'-O-methyl nucleotide
  modified_base 71: mod_base = OTHER; note = 2'-O-methyl nucleotide
  modified_base 72: mod_base = OTHER; note = 2'-O-methyl nucleotide
  modified_base 73: mod_base = OTHER; note = 2'-O-methyl nucleotide
  modified_base 74: mod_base = OTHER; note = 2'-O-methyl nucleotide
  modified_base 75: mod_base = OTHER; note = 2'-O-methyl nucleotide
  modified_base 80: mod_base = OTHER; note = 2'-O-methyl nucleotide
  modified_base 82: mod_base = OTHER; note = 2'-O-methyl nucleotide
  modified_base 85: mod_base = OTHER; note = 2'-O-methyl nucleotide
  modified_base 87: mod_base = OTHER; note = 2'-O-methyl nucleotide
  modified_base 88: mod_base = OTHER; note = 2'-O-methyl nucleotide
  modified_base 89: mod_base = OTHER; note = 2'-O-methyl nucleotide
  modified_base 90: mod_base = OTHER; note = 2'-O-methyl nucleotide
  modified_base 91: mod_base = OTHER; note = 2'-O-methyl nucleotide
  modified_base 92: mod_base = OTHER; note = 2'-O-methyl nucleotide
  modified_base 94: mod_base = OTHER; note = 2'-O-methyl nucleotide
  modified_base 95: mod_base = OTHER; note = 2'-O-methyl nucleotide
  modified_base 96: mod_base = OTHER; note = 2'-O-methyl nucleotide
  modified_base 97: mod_base = OTHER; note = 2'-O-methyl nucleotide
  modified_base 104: mod_base = OTHER; note = phosphorothioate linkage
  modified_base 105: mod_base = OTHER; note = 2'-O-methyl nucleotide, phosphorothioate linkage
  modified_base 106: mod_base = OTHER; note = 2'-O-methyl nucleotide
  source 1..106: mol_type = other RNA

SEQ ID NO: 729 - RNA, 105 nt, synthetic construct
  misc_feature 1..105: note = Synthetic
  variation 1..24: note = n is a, c, g, or u
  modified_base 1: mod_base = OTHER; note = 2'-O-methyl nucleotide, phosphorothioate linkage
  modified_base 2: mod_base = OTHER; note = 2'-O-methyl nucleotide, phosphorothioate linkage
  modified_base 3: mod_base = OTHER; note = 2'-O-methyl nucleotide, phosphorothioate linkage
  modified_base 4: mod_base = OTHER; note = 2'-O-methyl nucleotide
  modified_base 5: mod_base = OTHER; note = 2'-O-methyl nucleotide
  modified_base 8: mod_base = OTHER; note = 2'-O-methyl nucleotide
  modified_base 9: mod_base = OTHER; note = 2'-O-methyl nucleotide
  modified_base 11: mod_base = OTHER; note = 2'-O-methyl nucleotide
  modified_base 13: mod_base = OTHER; note = 2'-O-methyl nucleotide
  modified_base 18: mod_base = OTHER; note = 2'-O-methyl nucleotide
  modified_base 22: mod_base = OTHER; note = 2'-O-methyl nucleotide
  modified_base 25: mod_base = OTHER; note = 2'-O-methyl nucleotide
  modified_base 29: mod_base = OTHER; note = 2'-O-methyl nucleotide
  modified_base 30: mod_base = OTHER; note = 2'-O-methyl nucleotide
  modified_base 31: mod_base = OTHER; note = 2'-O-methyl nucleotide
  modified_base 32: mod_base = OTHER; note = 2'-O-methyl nucleotide
  modified_base 37: mod_base = OTHER; note = 2'-O-methyl nucleotide
  modified_base 38: mod_base = OTHER; note = 2'-O-methyl nucleotide
  modified_base 39: mod_base = OTHER; note = 2'-O-methyl nucleotide
  modified_base 40: mod_base = OTHER; note = 2'-O-methyl nucleotide
  modified_base 41: mod_base = OTHER; note = 2'-O-methyl nucleotide
  modified_base 42: mod_base = OTHER; note = 2'-O-methyl nucleotide
  modified_base 43: mod_base = OTHER; note = 2'-O-methyl nucleotide
  modified_base 44: mod_base = OTHER; note = 2'-O-methyl nucleotide
  modified_base 45: mod_base = OTHER; note = 2'-O-methyl nucleotide
  modified_base 46: mod_base = OTHER; note = 2'-O-methyl nucleotide
  modified_base 47: mod_base = OTHER; note = 2'-O-methyl nucleotide
  modified_base 51: mod_base = OTHER; note = 2'-O-methyl nucleotide
  modified_base 52: mod_base = OTHER; note = 2'-O-methyl nucleotide
  modified_base 55: mod_base = OTHER; note = 2'-O-methyl nucleotide
  modified_base 58: mod_base = OTHER; note = phosphorothioate linkage
  modified_base 62: mod_base = OTHER; note = 2'-O-methyl nucleotide
  modified_base 63: mod_base = OTHER; note = 2'-O-methyl nucleotide
  modified_base 65: mod_base = OTHER; note = 2'-O-methyl nucleotide
  modified_base 66: mod_base = OTHER; note = 2'-O-methyl nucleotide
  modified_base 67: mod_base = OTHER; note = 2'-O-methyl nucleotide
  modified_base 68: mod_base = OTHER; note = 2'-O-methyl nucleotide
  modified_base 69: mod_base = OTHER; note = 2'-O-methyl nucleotide
  modified_base 70: mod_base = OTHER; note = 2'-O-methyl nucleotide
  modified_base 71: mod_base = OTHER; note = 2'-O-methyl nucleotide
  modified_base 72: mod_base = OTHER; note = 2'-O-methyl nucleotide
  modified_base 73: mod_base = OTHER; note = 2'-O-methyl nucleotide
  modified_base 74: mod_base = OTHER; note = 2'-O-methyl nucleotide
  modified_base 79: mod_base = OTHER; note = 2'-O-methyl nucleotide
  modified_base 81: mod_base = OTHER; note = 2'-O-methyl nucleotide
  modified_base 84: mod_base = OTHER; note = 2'-O-methyl nucleotide
  modified_base 90: mod_base = OTHER; note = 2'-O-methyl nucleotide
  modified_base 91: mod_base = OTHER; note = 2'-O-methyl nucleotide
  modified_base 93: mod_base = OTHER; note = 2'-O-methyl nucleotide
  modified_base 94: mod_base = OTHER; note = 2'-O-methyl nucleotide
  modified_base 95: mod_base = OTHER; note = 2'-O-methyl nucleotide
  modified_base 96: mod_base = OTHER; note = 2'-O-methyl nucleotide
  modified_base 103: mod_base = OTHER; note = phosphorothioate linkage
  modified_base 104: mod_base = OTHER; note = 2'-O-methyl nucleotide, phosphorothioate linkage
  modified_base 105: mod_base = OTHER; note = 2'-O-methyl nucleotide
  source 1..105: mol_type = other RNA
nnnnnnnnnnnnnnnnnnnnnnnngttgtagctcccttcgaaagaccgttgctacaataaggccgtcgaaagatgtgccgcaacgctctgccttctggcatcgtt

SEQ ID NO: 730 - RNA, 105 nt, synthetic construct; identical to SEQ ID NO: 729
  misc_feature 1..105: note = Synthetic
  variation 1..24: note = n is a, c, g, or u
  modified_base 1: mod_base = OTHER; note = 2'-O-methyl nucleotide, phosphorothioate linkage
  modified_base 2: mod_base = OTHER; note = 2'-O-methyl nucleotide, phosphorothioate linkage
  modified_base 3: mod_base = OTHER; note = 2'-O-methyl nucleotide, phosphorothioate linkage
  modified_base 4: mod_base = OTHER; note = 2'-O-methyl nucleotide
  modified_base 5: mod_base = OTHER; note = 2'-O-methyl nucleotide
  modified_base 8: mod_base = OTHER; note = 2'-O-methyl nucleotide
  modified_base 9: mod_base = OTHER; note = 2'-O-methyl nucleotide
  modified_base 11: mod_base = OTHER; note = 2'-O-methyl nucleotide
  modified_base 13: mod_base = OTHER; note = 2'-O-methyl nucleotide
  modified_base 18: mod_base = OTHER; note = 2'-O-methyl nucleotide
  modified_base 22: mod_base = OTHER; note = 2'-O-methyl nucleotide
  modified_base 25: mod_base = OTHER; note = 2'-O-methyl nucleotide
  modified_base 29: mod_base = OTHER; note = 2'-O-methyl nucleotide
  modified_base 30: mod_base = OTHER; note = 2'-O-methyl nucleotide
  modified_base 31: mod_base = OTHER; note = 2'-O-methyl nucleotide
  modified_base 32: mod_base = OTHER; note = 2'-O-methyl nucleotide
  modified_base 37: mod_base = OTHER; note = 2'-O-methyl nucleotide
  modified_base 38: mod_base = OTHER; note = 2'-O-methyl nucleotide
  modified_base 39: mod_base = OTHER; note = 2'-O-methyl nucleotide
  modified_base 40: mod_base = OTHER; note = 2'-O-methyl nucleotide
  modified_base 41: mod_base = OTHER; note = 2'-O-methyl nucleotide
  modified_base 42: mod_base = OTHER; note = 2'-O-methyl nucleotide
  modified_base 43: mod_base = OTHER; note = 2'-O-methyl nucleotide
  modified_base 44: mod_base = OTHER; note = 2'-O-methyl nucleotide
  modified_base 45: mod_base = OTHER; note = 2'-O-methyl nucleotide
  modified_base 46: mod_base = OTHER; note = 2'-O-methyl nucleotide
  modified_base 47: mod_base = OTHER; note = 2'-O-methyl nucleotide
  modified_base 51: mod_base = OTHER; note = 2'-O-methyl nucleotide
  modified_base 52: mod_base = OTHER; note = 2'-O-methyl nucleotide
  modified_base 55: mod_base = OTHER; note = 2'-O-methyl nucleotide
  modified_base 62: mod_base = OTHER; note = 2'-O-methyl nucleotide
  modified_base 63: mod_base = OTHER; note = 2'-O-methyl nucleotide
  modified_base 65: mod_base = OTHER; note = 2'-O-methyl nucleotide
  modified_base 66: mod_base = OTHER; note = 2'-O-methyl nucleotide
  modified_base 67: mod_base = OTHER; note = 2'-O-methyl nucleotide
  modified_base 68: mod_base = OTHER; note = 2'-O-methyl nucleotide
  modified_base 69: mod_base = OTHER; note = 2'-O-methyl nucleotide
  modified_base 70: mod_base = OTHER; note = 2'-O-methyl nucleotide
  modified_base 71: mod_base = OTHER; note = 2'-O-methyl nucleotide
  modified_base 72: mod_base = OTHER; note = 2'-O-methyl nucleotide
  modified_base 73: mod_base = OTHER; note = 2'-O-methyl nucleotide
  modified_base 74: mod_base = OTHER; note = 2'-O-methyl nucleotide
  modified_base 79: mod_base = OTHER; note = 2'-O-methyl nucleotide
  modified_base 81: mod_base = OTHER; note = 2'-O-methyl nucleotide
  modified_base 84: mod_base = OTHER; note = 2'-O-methyl nucleotide
  modified_base 90: mod_base = OTHER; note = 2'-O-methyl nucleotide
  modified_base 91: mod_base = OTHER; note = 2'-O-methyl nucleotide
  modified_base 93: mod_base = OTHER; note = 2'-O-methyl nucleotide
  modified_base 94: mod_base = OTHER; note = 2'-O-methyl nucleotide
  modified_base 95: mod_base = OTHER; note = 2'-O-methyl nucleotide
  modified_base 96: mod_base = OTHER; note = 2'-O-methyl nucleotide
  modified_base 103: mod_base = OTHER; note = phosphorothioate linkage
  modified_base 104: mod_base = OTHER; note = 2'-O-methyl nucleotide, phosphorothioate linkage
  modified_base 105: mod_base = OTHER; note = 2'-O-methyl nucleotide
  source 1..105: mol_type = other RNA

SEQ ID NO: 731 - RNA, 101 nt, synthetic construct; identical to SEQ ID NO: 720
  misc_feature 1..101: note = Synthetic
  variation 1..24: note = n is a, c, g, or u
  modified_base 1: mod_base = OTHER; note = 2'-O-methyl nucleotide, phosphorothioate linkage
  modified_base 2: mod_base = OTHER; note = 2'-O-methyl nucleotide, phosphorothioate linkage
  modified_base 3: mod_base = OTHER; note = 2'-O-methyl nucleotide, phosphorothioate linkage
  modified_base 4: mod_base = OTHER; note = 2'-O-methyl nucleotide
  modified_base 5: mod_base = OTHER; note = 2'-O-methyl nucleotide
  modified_base 8: mod_base = OTHER; note = 2'-O-methyl nucleotide
  modified_base 9: mod_base = OTHER; note = 2'-O-methyl nucleotide
  modified_base 11: mod_base = OTHER; note = 2'-O-methyl nucleotide
  modified_base 13: mod_base = OTHER; note = 2'-O-methyl nucleotide
  modified_base 18: mod_base = OTHER; note = 2'-O-methyl nucleotide
  modified_base 22: mod_base = OTHER; note = 2'-O-methyl nucleotide
  modified_base 25: mod_base = OTHER; note = 2'-O-methyl nucleotide
  modified_base 29: mod_base = OTHER; note = 2'-O-methyl nucleotide
  modified_base 30: mod_base = OTHER; note = 2'-O-methyl nucleotide
  modified_base 31: mod_base = OTHER; note = 2'-O-methyl nucleotide
  modified_base 32: mod_base = OTHER; note = 2'-O-methyl nucleotide
  modified_base 37: mod_base = OTHER; note = 2'-O-methyl nucleotide
  modified_base 38: mod_base = OTHER; note = 2'-O-methyl nucleotide
  modified_base 39: mod_base = OTHER; note = 2'-O-methyl nucleotide
  modified_base 40: mod_base = OTHER; note = 2'-O-methyl nucleotide
  modified_base 41: mod_base = OTHER; note = 2'-O-methyl nucleotide
  modified_base 42: mod_base = OTHER; note = 2'-O-methyl nucleotide
  modified_base 43: mod_base = OTHER; note = 2'-O-methyl nucleotide
  modified_base 47: mod_base = OTHER; note = 2'-O-methyl nucleotide
  modified_base 48: mod_base = OTHER; note = 2'-O-methyl nucleotide
  modified_base 51: mod_base = OTHER; note = 2'-O-methyl nucleotide
  modified_base 54: mod_base = OTHER; note = phosphorothioate linkage
  modified_base 58: mod_base = OTHER; note = 2'-O-methyl nucleotide
  modified_base 59: mod_base = OTHER; note = 2'-O-methyl nucleotide
  modified_base 61: mod_base = OTHER; note = 2'-O-methyl nucleotide
  modified_base 62: mod_base = OTHER; note = 2'-O-methyl nucleotide
  modified_base 63: mod_base = OTHER; note = 2'-O-methyl nucleotide
  modified_base 64: mod_base = OTHER; note = 2'-O-methyl nucleotide
  modified_base 65: mod_base = OTHER; note = 2'-O-methyl nucleotide
  modified_base 66: mod_base = OTHER; note = 2'-O-methyl nucleotide
  modified_base 67: mod_base = OTHER; note = 2'-O-methyl nucleotide
  modified_base 68: mod_base = OTHER; note = 2'-O-methyl nucleotide
  modified_base 69: mod_base = OTHER; note = 2'-O-methyl nucleotide
  modified_base 70: mod_base = OTHER; note = 2'-O-methyl nucleotide
  modified_base 75: mod_base = OTHER; note = 2'-O-methyl nucleotide
  modified_base 77: mod_base = OTHER; note = 2'-O-methyl nucleotide
  modified_base 80: mod_base = OTHER; note = 2'-O-methyl nucleotide
  modified_base 86: mod_base = OTHER; note = 2'-O-methyl nucleotide
  modified_base 87: mod_base = OTHER; note = 2'-O-methyl nucleotide
  modified_base 89: mod_base = OTHER; note = 2'-O-methyl nucleotide
  modified_base 90: mod_base = OTHER; note = 2'-O-methyl nucleotide
  modified_base 91: mod_base = OTHER; note = 2'-O-methyl nucleotide
  modified_base 92: mod_base = OTHER; note = 2'-O-methyl nucleotide
  modified_base 99: mod_base = OTHER; note = phosphorothioate linkage
  modified_base 100: mod_base = OTHER; note = 2'-O-methyl nucleotide, phosphorothioate linkage
  modified_base 101: mod_base = OTHER; note = 2'-O-methyl nucleotide
  source 1..101: mol_type = other RNA

SEQ ID NO: 732 - RNA, 101 nt, synthetic construct; identical to SEQ ID NO: 720
  misc_feature 1..101: note = Synthetic
  variation 1..24: note = n is a, c, g, or u
  modified_base 1: mod_base = OTHER; note = 2'-O-methyl nucleotide, phosphorothioate linkage
  modified_base 2: mod_base = OTHER; note = 2'-O-methyl nucleotide, phosphorothioate linkage
  modified_base 3: mod_base = OTHER; note = 2'-O-methyl nucleotide, phosphorothioate linkage
  modified_base 4: mod_base = OTHER; note = 2'-O-methyl nucleotide
  modified_base 5: mod_base = OTHER; note = 2'-O-methyl nucleotide
  modified_base 8: mod_base = OTHER; note = 2'-O-methyl nucleotide
  modified_base 9: mod_base = OTHER; note = 2'-O-methyl nucleotide
  modified_base 11: mod_base = OTHER; note = 2'-O-methyl nucleotide
  modified_base 13: mod_base = OTHER; note = 2'-O-methyl nucleotide
  modified_base 18: mod_base = OTHER; note = 2'-O-methyl nucleotide
  modified_base 22: mod_base = OTHER; note = 2'-O-methyl nucleotide
  modified_base 25: mod_base = OTHER; note = 2'-O-methyl nucleotide
  modified_base 29: mod_base = OTHER; note = 2'-O-methyl nucleotide
  modified_base 30: mod_base = OTHER; note = 2'-O-methyl nucleotide
  modified_base 31: mod_base = OTHER; note = 2'-O-methyl nucleotide
  modified_base 32: mod_base = OTHER; note = 2'-O-methyl nucleotide
  modified_base 37: mod_base = OTHER; note = 2'-O-methyl nucleotide
  modified_base 38: mod_base = OTHER; note = 2'-O-methyl nucleotide
  modified_base 39: mod_base = OTHER; note = 2'-O-methyl nucleotide
  modified_base 40: mod_base = OTHER; note = 2'-O-methyl nucleotide
  modified_base 41: mod_base = OTHER; note = 2'-O-methyl nucleotide
  modified_base 42: mod_base = OTHER; note = 2'-O-methyl nucleotide
  modified_base 43: mod_base = OTHER; note = 2'-O-methyl nucleotide
  modified_base 47: mod_base = OTHER; note = 2'-O-methyl nucleotide
  modified_base 48: mod_base = OTHER; note = 2'-O-methyl nucleotide
  modified_base 51: mod_base = OTHER; note = 2'-O-methyl nucleotide
  modified_base 58: mod_base = OTHER; note = 2'-O-methyl nucleotide
  modified_base 59: mod_base = OTHER; note = 2'-O-methyl nucleotide
  modified_base 61: mod_base = OTHER; note = 2'-O-methyl nucleotide
  modified_base 62: mod_base = OTHER; note = 2'-O-methyl nucleotide
  modified_base 63: mod_base = OTHER; note = 2'-O-methyl nucleotide
  modified_base 64: mod_base = OTHER; note = 2'-O-methyl nucleotide
  modified_base 65: mod_base = OTHER; note = 2'-O-methyl nucleotide
  modified_base 66: mod_base = OTHER; note = 2'-O-methyl nucleotide
  modified_base 67: mod_base = OTHER; note = 2'-O-methyl nucleotide
  modified_base 68: mod_base = OTHER; note = 2'-O-methyl nucleotide
  modified_base 69: mod_base = OTHER; note = 2'-O-methyl nucleotide
  modified_base 70: mod_base = OTHER; note = 2'-O-methyl nucleotide
  modified_base 75: mod_base = OTHER; note = 2'-O-methyl nucleotide
  modified_base 77: mod_base = OTHER; note = 2'-O-methyl nucleotide
  modified_base 80: mod_base = OTHER; note = 2'-O-methyl nucleotide
  modified_base 86: mod_base = OTHER; note = 2'-O-methyl nucleotide
  modified_base 87: mod_base = OTHER; note = 2'-O-methyl nucleotide
  modified_base 89: mod_base = OTHER; note = 2'-O-methyl nucleotide
  modified_base 90: mod_base = OTHER; note = 2'-O-methyl nucleotide
  modified_base 91: mod_base = OTHER; note = 2'-O-methyl nucleotide
  modified_base 92: mod_base = OTHER; note = 2'-O-methyl nucleotide
  modified_base 99: mod_base = OTHER; note = phosphorothioate linkage
  modified_base 100: mod_base = OTHER; note = 2'-O-methyl nucleotide, phosphorothioate linkage
  modified_base 101: mod_base = OTHER; note = 2'-O-methyl nucleotide
  source 1..101: mol_type = other RNA

SEQ ID NO: 733-769 - skipped (37 entries)

SEQ ID NO: 770 - RNA, 94 nt, synthetic construct
  misc_feature 1..94: note = Synthetic
  variation 1..25: note = n is a, c, g, or u
  variation 21..25: note = n may be present or absent
  misc_feature 40..41: note = site of linker L1
  misc_feature 64..65: note = site of linker L1
  misc_feature 85..86: note = site of linker L1
  source 1..94: mol_type = other RNA
nnnnnnnnnnnnnnnnnnnnnnnnngttgtagctcccttcgaccgttgctacaataaggccgtcgatgtgccgcaacgctctgccggcatcgtt

SEQ ID NO: 771 - RNA, 93 nt, synthetic construct
  misc_feature 1..93: note = Synthetic
  variation 1..24: note = n is a, c, g, or u
  modified_base 1: mod_base = OTHER; note = 2'-O-methyl nucleotide, phosphorothioate linkage
  modified_base 2: mod_base = OTHER; note = 2'-O-methyl nucleotide, phosphorothioate linkage
  modified_base 3: mod_base = OTHER; note = 2'-O-methyl nucleotide, phosphorothioate linkage
  modified_base 4: mod_base = OTHER; note = 2'-O-methyl nucleotide
  modified_base 5: mod_base = OTHER; note = 2'-O-methyl nucleotide
  modified_base 8: mod_base = OTHER; note = 2'-O-methyl nucleotide
  modified_base 9: mod_base = OTHER; note = 2'-O-methyl nucleotide
  modified_base 11: mod_base = OTHER; note = 2'-O-methyl nucleotide
  modified_base 13: mod_base = OTHER; note = 2'-O-methyl nucleotide
  modified_base 18: mod_base = OTHER; note = 2'-O-methyl nucleotide
  modified_base 22: mod_base = OTHER; note = 2'-O-methyl nucleotide
  modified_base 25: mod_base = OTHER; note = 2'-O-methyl nucleotide
  modified_base 29: mod_base = OTHER; note = 2'-O-methyl nucleotide
  modified_base 30: mod_base = OTHER; note = 2'-O-methyl nucleotide
  modified_base 31: mod_base = OTHER; note = 2'-O-methyl nucleotide
  modified_base 32: mod_base = OTHER; note = 2'-O-methyl nucleotide
  modified_base 37: mod_base = OTHER; note = 2'-O-methyl nucleotide
  modified_base 38: mod_base = OTHER; note = 2'-O-methyl nucleotide
  modified_base 39: mod_base = OTHER; note = 2'-O-methyl nucleotide
  misc_feature 39..40: note = site of linker L1
  modified_base 40: mod_base = OTHER; note = 2'-O-methyl nucleotide
  modified_base 41: mod_base = OTHER; note = 2'-O-methyl nucleotide
  modified_base 42: mod_base = OTHER; note = 2'-O-methyl nucleotide
  modified_base 43: mod_base = OTHER; note = 2'-O-methyl nucleotide
  modified_base 47: mod_base = OTHER; note = 2'-O-methyl nucleotide
  modified_base 48: mod_base = OTHER; note = 2'-O-methyl nucleotide
  modified_base 51: mod_base = OTHER; note = 2'-O-methyl nucleotide
  modified_base 54: mod_base = OTHER; note = phosphorothioate linkage
  modified_base 58: mod_base = OTHER; note = 2'-O-methyl nucleotide
  modified_base 59: mod_base = OTHER; note = 2'-O-methyl nucleotide
  modified_base 61: mod_base = OTHER; note = 2'-O-methyl nucleotide
  modified_base 62: mod_base = OTHER; note = 2'-O-methyl nucleotide
  modified_base 63: mod_base = OTHER; note = 2'-O-methyl nucleotide
  misc_feature 63..64: note = site of linker L1
  modified_base 64: mod_base = OTHER; note = 2'-O-methyl nucleotide
  modified_base 65: mod_base = OTHER; note = 2'-O-methyl nucleotide
  modified_base 66: mod_base = OTHER; note = 2'-O-methyl nucleotide
  modified_base 71: mod_base = OTHER; note = 2'-O-methyl nucleotide
  modified_base 73: mod_base = OTHER; note = 2'-O-methyl nucleotide
  modified_base 76: mod_base = OTHER; note = 2'-O-methyl nucleotide
  modified_base 82: mod_base = OTHER; note = 2'-O-methyl nucleotide
  modified_base 83: mod_base = OTHER; note = 2'-O-methyl nucleotide
  misc_feature 84..85: note = site of linker L1
  modified_base 91: mod_base = OTHER; note = phosphorothioate linkage
  modified_base 92: mod_base = OTHER; note = 2'-O-methyl nucleotide, phosphorothioate linkage
  modified_base 93: mod_base = OTHER; note = 2'-O-methyl nucleotide
  source 1..93: mol_type = other RNA
nnnnnnnnnnnnnnnnnnnnnnnngttgtagctcccttcgaccgttgctacaataaggccgtcgatgtgccgcaacgctctgccggcatcgtt

SEQ ID NO: 772 - RNA, 89 nt, synthetic construct
  misc_feature 1..89: note = Synthetic
  variation 1..24: note = n is a, c, g, or u
  modified_base 1: mod_base = OTHER; note = 2'-O-methyl nucleotide, phosphorothioate linkage
  modified_base 2: mod_base = OTHER; note = 2'-O-methyl nucleotide, phosphorothioate linkage
  modified_base 3: mod_base = OTHER; note = 2'-O-methyl nucleotide, phosphorothioate linkage
  modified_base 4: mod_base = OTHER; note = 2'-O-methyl nucleotide
  modified_base 5: mod_base = OTHER; note = 2'-O-methyl nucleotide
  modified_base 8: mod_base = OTHER; note = 2'-O-methyl nucleotide
  modified_base 9: mod_base = OTHER; note = 2'-O-methyl nucleotide
  modified_base 11: mod_base = OTHER; note = 2'-O-methyl nucleotide
  modified_base 13: mod_base = OTHER; note = 2'-O-methyl nucleotide
  modified_base 18: mod_base = OTHER; note = 2'-O-methyl nucleotide
  modified_base 22: mod_base = OTHER; note = 2'-O-methyl nucleotide
  modified_base 25: mod_base = OTHER; note = 2'-O-methyl nucleotide
  modified_base 29: mod_base = OTHER; note = 2'-O-methyl nucleotide
  modified_base 30: mod_base = OTHER; note = 2'-O-methyl nucleotide
  modified_base 31: mod_base = OTHER; note = 2'-O-methyl nucleotide
  modified_base 32: mod_base = OTHER; note = 2'-O-methyl nucleotide
  modified_base 37: mod_base = OTHER; note = 2'-O-methyl nucleotide
  misc_feature 37..38: note = site of linker L1
  modified_base 38: mod_base = OTHER; note = 2'-O-methyl nucleotide
  modified_base 39: mod_base = OTHER; note = 2'-O-methyl nucleotide
  modified_base 43: mod_base = OTHER; note = 2'-O-methyl nucleotide
  modified_base 44: mod_base = OTHER; note = 2'-O-methyl nucleotide
  modified_base 47: mod_base = OTHER; note = 2'-O-methyl nucleotide
  modified_base 50: mod_base = OTHER; note = phosphorothioate linkage
  modified_base 54: mod_base = OTHER; note = 2'-O-methyl nucleotide
  modified_base 55: mod_base = OTHER; note = 2'-O-methyl nucleotide
  modified_base 57: mod_base = OTHER; note = 2'-O-methyl nucleotide
  modified_base 58: mod_base = OTHER; note = 2'-O-methyl nucleotide
  modified_base 59: mod_base = OTHER; note = 2'-O-methyl nucleotide
  misc_feature 59..60: note = site of linker L1
  modified_base 60: mod_base = OTHER; note = 2'-O-methyl nucleotide
  modified_base 61: mod_base = OTHER; note = 2'-O-methyl nucleotide
  modified_base 62: mod_base = OTHER; note = 2'-O-methyl nucleotide
  modified_base 67: mod_base = OTHER; note = 2'-O-methyl nucleotide
  modified_base 69: mod_base = OTHER; note = 2'-O-methyl nucleotide
  modified_base 72: mod_base = OTHER; note = 2'-O-methyl nucleotide
  modified_base 78: mod_base = OTHER; note = 2'-O-methyl nucleotide
  modified_base 79: mod_base = OTHER; note = 2'-O-methyl nucleotide
  misc_feature 80: note = site of linker L1
  modified_base 87: mod_base = OTHER; note = phosphorothioate linkage
  modified_base 88: mod_base = OTHER; note = 2'-O-methyl nucleotide, phosphorothioate linkage
  modified_base 89: mod_base = OTHER; note = 2'-O-methyl nucleotide
  source 1..89: mol_type = other RNA
nnnnnnnnnnnnnnnnnnnnnnnngttgtagctccctccgttgctacaataaggccgtcgatgtgccgcaacgctctgccggcatcgtt

SEQ ID NO: 773 - RNA, 89 nt, synthetic construct; identical to SEQ ID NO: 772
  misc_feature 1..89: note = Synthetic
  variation 1..24: note = n is a, c, g, or u
  modified_base 25: mod_base = OTHER; note = 2'-O-methyl nucleotide
  modified_base 29: mod_base = OTHER; note = 2'-O-methyl nucleotide
  modified_base 30: mod_base = OTHER; note = 2'-O-methyl nucleotide
  modified_base 31: mod_base = OTHER; note = 2'-O-methyl nucleotide
  modified_base 32: mod_base = OTHER; note = 2'-O-methyl nucleotide
  modified_base 37: mod_base = OTHER; note = 2'-O-methyl nucleotide
  misc_feature 37..38: note = site of linker L1
  modified_base 38: mod_base = OTHER; note = 2'-O-methyl nucleotide
  modified_base 39: mod_base = OTHER; note = 2'-O-methyl nucleotide
  modified_base 43: mod_base = OTHER; note = 2'-O-methyl nucleotide
  modified_base 44: mod_base = OTHER; note = 2'-O-methyl nucleotide
  modified_base 47: mod_base = OTHER; note = 2'-O-methyl nucleotide
  modified_base 50: mod_base = OTHER; note = phosphorothioate linkage
  modified_base 54: mod_base = OTHER; note = 2'-O-methyl nucleotide
  modified_base 55: mod_base = OTHER; note = 2'-O-methyl nucleotide
  modified_base 57: mod_base = OTHER; note = 2'-O-methyl nucleotide
  modified_base 58: mod_base = OTHER; note = 2'-O-methyl nucleotide
  modified_base 59: mod_base = OTHER; note = 2'-O-methyl nucleotide
  misc_feature 59..60: note = site of linker L1
  modified_base 60: mod_base = OTHER; note = 2'-O-methyl nucleotide
  modified_base 61: mod_base = OTHER; note = 2'-O-methyl nucleotide
  modified_base 62: mod_base = OTHER; note = 2'-O-methyl nucleotide
  modified_base 67: mod_base = OTHER; note = 2'-O-methyl nucleotide
  modified_base 69: mod_base = OTHER; note = 2'-O-methyl nucleotide
  modified_base 72: mod_base = OTHER; note = 2'-O-methyl nucleotide
  modified_base 78: mod_base = OTHER; note = 2'-O-methyl nucleotide
  modified_base 79: mod_base = OTHER; note = 2'-O-methyl nucleotide
  misc_feature 80: note = site of linker L1
  modified_base 87: mod_base = OTHER; note = phosphorothioate linkage
  modified_base 88: mod_base = OTHER; note = 2'-O-methyl nucleotide, phosphorothioate linkage
  modified_base 89: mod_base = OTHER; note = 2'-O-methyl nucleotide
  source 1..89: mol_type = other RNA

SEQ ID NO: 774 - RNA, 90 nt, synthetic construct
  misc_feature 1..90: note = Synthetic
  variation 1..25: note = n is a, c, g, or u
  variation 21..25: note = n may be present or absent
  modified_base 30: mod_base = OTHER; note = 2'-O-methyl nucleotide
  modified_base 31: mod_base = OTHER; note = 2'-O-methyl nucleotide
  modified_base 32: mod_base = OTHER; note = 2'-O-methyl nucleotide
  modified_base 33: mod_base = OTHER; note = 2'-O-methyl nucleotide
  modified_base 38: mod_base = OTHER; note = 2'-O-methyl nucleotide
  misc_feature 38..39: note = site of linker L1
  modified_base 39: mod_base = OTHER; note = 2'-O-methyl nucleotide
  modified_base 40: mod_base = OTHER; note = 2'-O-methyl nucleotide
  modified_base 44: mod_base = OTHER; note = 2'-O-methyl nucleotide
  modified_base 45: mod_base = OTHER; note = 2'-O-methyl nucleotide
  modified_base 48: mod_base = OTHER; note = 2'-O-methyl nucleotide
  modified_base 51: mod_base = OTHER; note = phosphorothioate linkage
  modified_base 55: mod_base = OTHER; note = 2'-O-methyl nucleotide
  modified_base 56: mod_base = OTHER; note = 2'-O-methyl nucleotide
  modified_base 58: mod_base = OTHER; note = 2'-O-methyl nucleotide
  modified_base 59: mod_base = OTHER; note = 2'-O-methyl nucleotide
  modified_base 60: mod_base = OTHER; note = 2'-O-methyl nucleotide
  misc_feature 60..61: note = site of linker L1
  modified_base 61: mod_base = OTHER; note = 2'-O-methyl nucleotide
  modified_base 62: mod_base = OTHER; note = 2'-O-methyl nucleotide
  modified_base 63: mod_base = OTHER; note = 2'-O-methyl nucleotide
  modified_base 68: mod_base = OTHER; note = 2'-O-methyl nucleotide
  modified_base 70: mod_base = OTHER; note = 2'-O-methyl nucleotide
  modified_base 73: mod_base = OTHER; note = 2'-O-methyl nucleotide
  modified_base 79: mod_base = OTHER; note = 2'-O-methyl nucleotide
  modified_base 80: mod_base = OTHER; note = 2'-O-methyl nucleotide
  misc_feature 81..82: note = site of linker L1
  modified_base 88: mod_base = OTHER; note = phosphorothioate linkage
  modified_base 89: mod_base = OTHER; note = 2'-O-methyl nucleotide, phosphorothioate linkage
  modified_base 90: mod_base = OTHER; note = 2'-O-methyl nucleotide
  source 1..90: mol_type = other RNA
nnnnnnnnnnnnnnnnnnnnnnnnngttgtagctccctccgttgctacaataaggccgtcgatgtgccgcaacgctctgccggcatcgtt

SEQ ID NO: 775 - RNA, 94 nt, synthetic construct
  misc_feature 1..94: note = Synthetic
  variation 1..25: note = n is a, c, g, or u
  variation 21..25: note = n may be present or absent
  modified_base 30: mod_base = OTHER; note = 2'-O-methyl nucleotide
  modified_base 31: mod_base = OTHER; note = 2'-O-methyl nucleotide
  modified_base 32: mod_base = OTHER; note = 2'-O-methyl nucleotide
  modified_base 33: mod_base = OTHER; note = 2'-O-methyl nucleotide
  modified_base 38: mod_base = OTHER; note = 2'-O-methyl nucleotide
  modified_base 39: mod_base = OTHER; note = 2'-O-methyl nucleotide
  modified_base 40: mod_base = OTHER; note = 2'-O-methyl nucleotide
  misc_feature 40..41: note = site of linker L1
  modified_base 41: mod_base = OTHER; note = 2'-O-methyl nucleotide
  modified_base 42: mod_base = OTHER; note = 2'-O-methyl nucleotide
  modified_base 43: mod_base = OTHER; note = 2'-O-methyl nucleotide
  modified_base 44: mod_base = OTHER; note = 2'-O-methyl nucleotide
  modified_base 48: mod_base = OTHER; note = 2'-O-methyl nucleotide
  modified_base 49: mod_base = OTHER; note = 2'-O-methyl nucleotide
  modified_base 52: mod_base = OTHER; note = 2'-O-methyl nucleotide
  modified_base 55: mod_base = OTHER; note = phosphorothioate linkage
  modified_base 59: mod_base = OTHER; note = 2'-O-methyl nucleotide
  modified_base 60: mod_base = OTHER; note = 2'-O-methyl nucleotide
  modified_base 62: mod_base = OTHER; note = 2'-O-methyl nucleotide
  modified_base 63: mod_base = OTHER; note = 2'-O-methyl nucleotide
  modified_base 64: mod_base = OTHER; note = 2'-O-methyl nucleotide
  misc_feature 64..65: note = site of linker L1
  modified_base 65: mod_base = OTHER; note = 2'-O-methyl nucleotide
  modified_base 66: mod_base = OTHER; note = 2'-O-methyl nucleotide
  modified_base 67: mod_base = OTHER; note = 2'-O-methyl nucleotide
  modified_base 72: mod_base = OTHER; note = 2'-O-methyl nucleotide
  modified_base 74: mod_base = OTHER; note = 2'-O-methyl nucleotide
  modified_base 77: mod_base = OTHER; note = 2'-O-methyl nucleotide
  modified_base 83: mod_base = OTHER; note = 2'-O-methyl nucleotide
  modified_base 84: mod_base = OTHER; note = 2'-O-methyl nucleotide
  misc_feature 85..86: note = site of linker L1
  modified_base 93: mod_base = OTHER; note = 2'-O-methyl nucleotide, phosphorothioate linkage
  modified_base 94: mod_base = OTHER; note = 2'-O-methyl nucleotide
  source 1..94: mol_type = other RNA
nnnnnnnnnnnnnnnnnnnnnnnnngttgtagctcccttgcaccgttgctacaataaggccgtcgatgtgccgcaacgctctgccggcatcgtt

SEQ ID NO: 776 - RNA, 94 nt, synthetic construct; identical to SEQ ID NO: 775
  misc_feature 1..94: note = Synthetic
  variation 1..25: note = n is a, c, g, or u
  variation 21..25: note = n may be present or absent
  modified_base 30: mod_base = OTHER; note = 2'-O-methyl nucleotide
  modified_base 31: mod_base = OTHER; note = 2'-O-methyl nucleotide
  modified_base 32: mod_base = OTHER; note = 2'-O-methyl nucleotide
  modified_base 33: mod_base = OTHER; note = 2'-O-methyl nucleotide
  modified_base 38: mod_base = OTHER; note = 2'-O-methyl nucleotide
  modified_base 39: mod_base = OTHER; note = 2'-O-methyl nucleotide
  modified_base 40: mod_base = OTHER; note = 2'-O-methyl nucleotide
  misc_feature 40..41: note = site of linker L1
  modified_base 41: mod_base = OTHER; note = 2'-O-methyl nucleotide
  modified_base 42: mod_base = OTHER; note = 2'-O-methyl nucleotide
  modified_base 43: mod_base = OTHER; note = 2'-O-methyl nucleotide
  modified_base 44: mod_base = OTHER; note = 2'-O-methyl nucleotide
  modified_base 48: mod_base = OTHER; note = 2'-O-methyl nucleotide
  modified_base 49: mod_base = OTHER; note = 2'-O-methyl nucleotide
  modified_base 52: mod_base = OTHER; note = 2'-O-methyl nucleotide
  modified_base 55: mod_base = OTHER; note = phosphorothioate linkage
  modified_base 59: mod_base = OTHER; note = 2'-O-methyl nucleotide
  modified_base 60: mod_base = OTHER; note = 2'-O-methyl nucleotide
  modified_base 62: mod_base = OTHER; note = 2'-O-methyl nucleotide
  modified_base 63: mod_base = OTHER; note = 2'-O-methyl nucleotide
  modified_base 64: mod_base = OTHER; note = 2'-O-methyl nucleotide
  misc_feature 64..65: note = site of linker L1
  modified_base 65: mod_base = OTHER; note = 2'-O-methyl nucleotide
  modified_base 66: mod_base = OTHER; note = 2'-O-methyl nucleotide
  modified_base 67: mod_base = OTHER; note = 2'-O-methyl nucleotide
  modified_base 72: mod_base = OTHER; note = 2'-O-methyl nucleotide
  modified_base 74: mod_base = OTHER; note = 2'-O-methyl nucleotide
  modified_base 77: mod_base = OTHER; note = 2'-O-methyl nucleotide
  modified_base 83: mod_base = OTHER; note = 2'-O-methyl nucleotide
  modified_base 84: mod_base = OTHER; note = 2'-O-methyl nucleotide
  misc_feature 85..86: note = site of linker L1
  modified_base 93: mod_base = OTHER; note = 2'-O-methyl nucleotide, phosphorothioate linkage
  modified_base 94: mod_base = OTHER; note = 2'-O-methyl nucleotide
  source 1..94: mol_type = other RNA

SEQ ID NO: 777 - RNA, 92 nt, synthetic construct
  misc_feature 1..92: note = Synthetic
  variation 1..25: note = n is a, c, g, or u
  variation 21..25: note = n may be present or absent
  modified_base 30: mod_base = OTHER; note = 2'-O-methyl nucleotide
  modified_base 31: mod_base = OTHER; note = 2'-O-methyl nucleotide
  modified_base 32: mod_base = OTHER; note = 2'-O-methyl nucleotide
  modified_base 33: mod_base = OTHER; note = 2'-O-methyl nucleotide
  modified_base 38: mod_base = OTHER; note = 2'-O-methyl nucleotide
  modified_base 39: mod_base = OTHER; note = 2'-O-methyl nucleotide
  misc_feature 39..40: note = site of linker L1
  modified_base 40: mod_base = OTHER; note = 2'-O-methyl nucleotide
  modified_base 41: mod_base = OTHER; note = 2'-O-methyl nucleotide
  modified_base 42: mod_base = OTHER; note = 2'-O-methyl nucleotide
  modified_base 46: mod_base = OTHER; note = 2'-O-methyl nucleotide
  modified_base 47: mod_base = OTHER; note = 2'-O-methyl nucleotide
  modified_base 50: mod_base = OTHER; note = 2'-O-methyl nucleotide
  modified_base 53: mod_base = OTHER; note = phosphorothioate linkage
  modified_base 57: mod_base = OTHER; note = 2'-O-methyl nucleotide
  modified_base 58: mod_base = OTHER; note = 2'-O-methyl nucleotide
  modified_base 60: mod_base = OTHER; note = 2'-O-methyl nucleotide
  modified_base 61: mod_base = OTHER; note = 2'-O-methyl nucleotide
  modified_base 62: mod_base = OTHER; note = 2'-O-methyl nucleotide
  misc_feature 62..63: note = site of linker L1
  modified_base 63: mod_base = OTHER; note = 2'-O-methyl nucleotide
  modified_base 64: mod_base = OTHER; note = 2'-O-methyl nucleotide
  modified_base 65: mod_base = OTHER; note = 2'-O-methyl nucleotide
  modified_base 70: mod_base = OTHER; note = 2'-O-methyl nucleotide
  modified_base 72: mod_base = OTHER; note = 2'-O-methyl nucleotide
  modified_base 75: mod_base = OTHER; note = 2'-O-methyl nucleotide
  modified_base 81: mod_base = OTHER; note = 2'-O-methyl nucleotide
  modified_base 82: mod_base = OTHER; note = 2'-O-methyl nucleotide
  misc_feature 83..84: note = site of linker L1
  modified_base 91: mod_base = OTHER; note = 2'-O-methyl nucleotide, phosphorothioate linkage
  modified_base 92: mod_base = OTHER; note = 2'-O-methyl nucleotide
  source 1..92: mol_type = other RNA
nnnnnnnnnnnnnnnnnnnnnnnnngttgtagctccctgcccgttgctacaataaggccgtcgatgtgccgcaacgctctgccggcatcgtt

SEQ ID NO: 778 - RNA, 90 nt, synthetic construct
  misc_feature 1..90: note = Synthetic
  variation 1..25: note = n is a, c, g, or u
  variation 21..25: note = n may be present or absent
  modified_base 30: mod_base = OTHER; note = 2'-O-methyl nucleotide
  modified_base 31: mod_base = OTHER; note = 2'-O-methyl nucleotide
  modified_base 32: mod_base = OTHER; note = 2'-O-methyl nucleotide
  modified_base 33: mod_base = OTHER; note = 2'-O-methyl nucleotide
  modified_base 38..39: mod_base = OTHER; note = 2'-O-methyl nucleotide
  misc_feature 38..39: note = site of linker L1
  modified_base 39: mod_base = OTHER; note = 2'-O-methyl nucleotide
  modified_base 40: mod_base = OTHER; note = 2'-O-methyl nucleotide
  modified_base 44: mod_base = OTHER; note = 2'-O-methyl nucleotide
  modified_base 45: mod_base = OTHER; note = 2'-O-methyl nucleotide
  modified_base 48: mod_base = OTHER; note = 2'-O-methyl nucleotide
  modified_base 51: mod_base = OTHER; note = phosphorothioate linkage
  modified_base 55: mod_base = OTHER; note = 2'-O-methyl nucleotide
  modified_base 56: mod_base = OTHER; note = 2'-O-methyl nucleotide
  modified_base 58: mod_base = OTHER; note = 2'-O-methyl nucleotide
  modified_base 59: mod_base = OTHER; note = 2'-O-methyl nucleotide
  modified_base 60: mod_base = OTHER; note = 2'-O-methyl nucleotide
  misc_feature 60..61: note = site of linker L1
  modified_base 61: mod_base = OTHER; note = 2'-O-methyl nucleotide
  modified_base 62: mod_base = OTHER; note = 2'-O-methyl nucleotide
  modified_base 63: mod_base = OTHER; note = 2'-O-methyl nucleotide
  modified_base 68: mod_base = OTHER; note = 2'-O-methyl nucleotide
  modified_base 70: mod_base = OTHER; note = 2'-O-methyl nucleotide
  modified_base 73: mod_base = OTHER; note = 2'-O-methyl nucleotide
  modified_base 79: mod_base = OTHER; note = 2'-O-methyl nucleotide
  modified_base 80: mod_base = OTHER; note = 2'-O-methyl nucleotide
  misc_feature 81..82: note = site of linker L1
  modified_base 89: mod_base = OTHER; note = 2'-O-methyl nucleotide, phosphorothioate linkage
  modified_base 90: mod_base = OTHER; note = 2'-O-methyl nucleotide
  source 1..90: mol_type = other RNA
nnnnnnnnnnnnnnnnnnnnnnnnngttgtagctcccgccgttgctacaataaggccgtcgatgtgccgcaacgctctgccggcatcgtt

SEQ ID NO: 779 - RNA, 88 nt, synthetic construct
  misc_feature 1..88: note = Synthetic
  variation 1..25: note = n is a, c, g, or u
  variation 21..25: note = n may be present or absent
  modified_base 30: mod_base = OTHER; note = 2'-O-methyl nucleotide
  modified_base 31: mod_base = OTHER; note = 2'-O-methyl nucleotide
  modified_base 32: mod_base = OTHER; note = 2'-O-methyl nucleotide
  modified_base 33: mod_base = OTHER; note = 2'-O-methyl nucleotide
  modified_base 37: mod_base = OTHER; note = 2'-O-methyl nucleotide
  misc_feature 37..38: note = site of linker L1
  modified_base 38: mod_base = OTHER; note = 2'-O-methyl nucleotide
  modified_base 42: mod_base = OTHER; note = 2'-O-methyl nucleotide
  modified_base 43: mod_base = OTHER; note = 2'-O-methyl nucleotide
  modified_base 46: mod_base = OTHER; note = 2'-O-methyl nucleotide
  modified_base 49: mod_base = OTHER; note = phosphorothioate linkage
  modified_base 53: mod_base = OTHER; note = 2'-O-methyl nucleotide
  modified_base 54: mod_base = OTHER; note = 2'-O-methyl nucleotide
  modified_base 56: mod_base = OTHER; note = 2'-O-methyl nucleotide
  modified_base 57: mod_base = OTHER; note = 2'-O-methyl nucleotide
  modified_base 58: mod_base = OTHER; note = 2'-O-methyl nucleotide
  misc_feature 58..59: note = site of linker L1
  modified_base 59: mod_base = OTHER; note = 2'-O-methyl nucleotide
  modified_base 60: mod_base = OTHER; note = 2'-O-methyl nucleotide
  modified_base 61: mod_base = OTHER; note = 2'-O-methyl nucleotide
  modified_base 66: mod_base = OTHER; note = 2'-O-methyl nucleotide
  modified_base 68: mod_base = OTHER; note = 2'-O-methyl nucleotide
  modified_base 71: mod_base = OTHER; note = 2'-O-methyl nucleotide
  modified_base 77: mod_base = OTHER; note = 2'-O-methyl nucleotide
  modified_base 78: mod_base = OTHER; note = 2'-O-methyl nucleotide
  misc_feature 79..80: note = site of linker L1
  modified_base 87: mod_base = OTHER; note = 2'-O-methyl nucleotide, phosphorothioate linkage
  modified_base 88: mod_base = OTHER; note = 2'-O-methyl nucleotide
  source 1..88: mol_type = other RNA
nnnnnnnnnnnnnnnnnnnnnnnnngttgtagctccgcgttgctacaataaggccgtcgatgtgccgcaacgctctgccggcatcgtt

SEQ ID NO: 780 - RNA, 86 nt, synthetic construct
  misc_feature 1..86: note = Synthetic
  variation 1..25: note = n is a, c, g, or u
  variation 21..25: note = n may be present or absent
  modified_base 30: mod_base = OTHER; note = 2'-O-methyl nucleotide
  modified_base 31: mod_base = OTHER; note = 2'-O-methyl nucleotide
  modified_base 32: mod_base = OTHER; note = 2'-O-methyl nucleotide
  modified_base 33: mod_base = OTHER; note = 2'-O-methyl nucleotide
  misc_feature 36..37: note = site of linker L1
  modified_base 40: mod_base = OTHER; note = 2'-O-methyl nucleotide
  modified_base 41: mod_base = OTHER; note = 2'-O-methyl nucleotide
  modified_base 44: mod_base = OTHER; note = 2'-O-methyl nucleotide
  modified_base 47: mod_base = OTHER; note = phosphorothioate linkage
  modified_base 51: mod_base = OTHER; note = 2'-O-methyl nucleotide
  modified_base 52: mod_base = OTHER; note = 2'-O-methyl nucleotide
  modified_base 54: mod_base = OTHER; note = 2'-O-methyl nucleotide
  modified_base 55: mod_base = OTHER; note = 2'-O-methyl nucleotide
  modified_base 56: mod_base = OTHER; note = 2'-O-methyl nucleotide
  misc_feature 56..57: note = site of linker L1
  modified_base 57: mod_base = OTHER; note = 2'-O-methyl nucleotide
  modified_base 58: mod_base = OTHER; note = 2'-O-methyl nucleotide
  modified_base 59: mod_base = OTHER; note = 2'-O-methyl nucleotide
  modified_base 64: mod_base = OTHER; note = 2'-O-methyl nucleotide
  modified_base 66: mod_base = OTHER; note = 2'-O-methyl nucleotide
  modified_base 69: mod_base = OTHER; note = 2'-O-methyl nucleotide
  modified_base 75: mod_base = OTHER; note = 2'-O-methyl nucleotide
  modified_base 76: mod_base = OTHER; note = 2'-O-methyl nucleotide
  misc_feature 77..78: note = site of linker L1
  modified_base 85: mod_base = OTHER; note = 2'-O-methyl nucleotide, phosphorothioate linkage
  modified_base 86: mod_base = OTHER; note = 2'-O-methyl nucleotide
  source 1..86: mol_type = other RNA
nnnnnnnnnnnnnnnnnnnnnnnnngttgtagctccgttgctacaataaggccgtcgatgtgccgcaacgctctgccggcatcgtt

SEQ ID NO: 781 - RNA, 96 nt, synthetic construct
  misc_feature 1..96: note = Synthetic
  variation 1..25: note = n is a, c, g, or u
  variation 21..25: note = n may be present or absent
  modified_base 30: mod_base = OTHER; note = 2'-O-methyl nucleotide
  modified_base 31: mod_base = OTHER; note = 2'-O-methyl nucleotide
  modified_base 32: mod_base = OTHER; note = 2'-O-methyl nucleotide
  modified_base 33: mod_base = OTHER; note = 2'-O-methyl nucleotide
  modified_base 38: mod_base = OTHER; note = 2'-O-methyl nucleotide
  modified_base 39: mod_base = OTHER; note = 2'-O-methyl nucleotide
  modified_base 40: mod_base = OTHER; note = 2'-O-methyl nucleotide
  misc_feature 40..41: note = site of linker L1
  modified_base 41: mod_base = OTHER; note = 2'-O-methyl nucleotide
  modified_base 42: mod_base = OTHER; note = 2'-O-methyl nucleotide
  modified_base 43: mod_base = OTHER; note = 2'-O-methyl nucleotide
  modified_base 44: mod_base = OTHER; note = 2'-O-methyl nucleotide
  modified_base 48: mod_base = OTHER; note = 2'-O-methyl nucleotide
  modified_base 49: mod_base = OTHER; note = 2'-O-methyl nucleotide
  modified_base 52: mod_base = OTHER; note = 2'-O-methyl nucleotide
  modified_base 55: mod_base = OTHER; note = phosphorothioate linkage
  modified_base 59: mod_base = OTHER; note = 2'-O-methyl nucleotide
  modified_base 60: mod_base = OTHER; note = 2'-O-methyl nucleotide
  modified_base 62: mod_base = OTHER; note = 2'-O-methyl nucleotide
  modified_base 63: mod_base = OTHER; note = 2'-O-methyl nucleotide
  modified_base 64: mod_base = OTHER; note = 2'-O-methyl nucleotide
  modified_base 65: mod_base = OTHER; note = 2'-O-methyl nucleotide
  misc_feature 65..66: note = site of linker L1
  modified_base 66: mod_base = OTHER; note = 2'-O-methyl nucleotide
  modified_base 67: mod_base = OTHER; note = 2'-O-methyl nucleotide
  modified_base 68: mod_base = OTHER; note = 2'-O-methyl nucleotide
  modified_base 69: mod_base = OTHER; note = 2'-O-methyl nucleotide
  modified_base 74: mod_base = OTHER; note = 2'-O-methyl nucleotide
  modified_base 76: mod_base = OTHER; note = 2'-O-methyl nucleotide
  modified_base 79: mod_base = OTHER; note = 2'-O-methyl nucleotide
  modified_base 85: mod_base = OTHER; note = 2'-O-methyl nucleotide
  modified_base 86: mod_base = OTHER; note = 2'-O-methyl nucleotide
  misc_feature 87..88: note = site of linker L1
  modified_base 95: mod_base = OTHER; note = 2'-O-methyl nucleotide, phosphorothioate linkage
  modified_base 96: mod_base = OTHER; note = 2'-O-methyl nucleotide
  source 1..96: mol_type = other RNA
nnnnnnnnnnnnnnnnnnnnnnnnngttgtagctcccttgcaccgttgctacaataaggccgtctagatgtgccgcaacgctctgccggcatcgtt

SEQ ID NO: 782 - RNA, 96 nt, synthetic construct
  misc_feature 1..96: note = Synthetic
  variation 1..25: note = n is a, c, g, or u
  variation 21..25: note = n may be present or absent
  modified_base 30: mod_base = OTHER; note = 2'-O-methyl nucleotide
  modified_base 31: mod_base = OTHER; note = 2'-O-methyl nucleotide
  modified_base 32: mod_base = OTHER; note = 2'-O-methyl nucleotide
  modified_base 33: mod_base = OTHER; note = 2'-O-methyl nucleotide
  modified_base 38: mod_base = OTHER; note = 2'-O-methyl nucleotide
  modified_base 39: mod_base = OTHER; note = 2'-O-methyl nucleotide
  modified_base 40: mod_base = OTHER; note = 2'-O-methyl nucleotide
  misc_feature 40..41: note = site of linker L1
  modified_base 41: mod_base = OTHER; note = 2'-O-methyl nucleotide
  modified_base 42: mod_base = OTHER; note = 2'-O-methyl nucleotide
  modified_base 43: mod_base = OTHER; note = 2'-O-methyl nucleotide
  modified_base 44: mod_base = OTHER; note = 2'-O-methyl nucleotide
  modified_base 48: mod_base = OTHER; note = 2'-O-methyl nucleotide
  modified_base 49: mod_base = OTHER; note = 2'-O-methyl nucleotide
  modified_base 52: mod_base = OTHER; note = 2'-O-methyl nucleotide
  modified_base 55: mod_base = OTHER; note = phosphorothioate linkage
  modified_base 59: mod_base = OTHER; note = 2'-O-methyl nucleotide
  modified_base 60: mod_base = OTHER; note = 2'-O-methyl nucleotide
  modified_base 62: mod_base = OTHER; note = 2'-O-methyl nucleotide
  modified_base 63: mod_base = OTHER; note = 2'-O-methyl nucleotide
  modified_base 64: mod_base = OTHER; note = 2'-O-methyl nucleotide
  misc_feature 64..65: note = site of linker L1
  modified_base 65: mod_base = OTHER; note = 2'-O-methyl nucleotide
  modified_base 66: mod_base = OTHER; note = 2'-O-methyl nucleotide
  modified_base 67: mod_base = OTHER; note = 2'-O-methyl nucleotide
  modified_base 72: mod_base = OTHER; note = 2'-O-methyl nucleotide
  modified_base 74: mod_base = OTHER; note = 2'-O-methyl nucleotide
  modified_base 77: mod_base = OTHER; note = 2'-O-methyl nucleotide
  modified_base 83: mod_base = OTHER; note = 2'-O-methyl nucleotide
  modified_base 84: mod_base = OTHER; note = 2'-O-methyl nucleotide
  modified_base 86: mod_base = OTHER; note = 2'-O-methyl nucleotide
  misc_feature 86..87: note = site of linker L1
  modified_base 87: mod_base = OTHER; note = 2'-O-methyl nucleotide
  modified_base 95: mod_base = OTHER; note = 2'-O-methyl nucleotide, phosphorothioate linkage
  modified_base 96: mod_base = OTHER; note = 2'-O-methyl nucleotide
  source 1..96: mol_type = other RNA
nnnnnnnnnnnnnnnnnnnnnnnnngttgtagctcccttgcaccgttgctacaataaggccgtcgatgtgccgcaacgctctgcctaggcatcgtt

SEQ ID NO: 783-800 - skipped (18 entries)

SEQ ID NO: 801 - DNA, 4005 bp, synthetic construct
  misc_feature 1..4005: note = Synthetic
  source 1..4005: mol_type = other DNA
atggacggctccggcggcggctcccccaagaagaagcggaaggtggaggacaagcggcccgccgccaccaagaaggccggccaggccaagaagaagaagggcggctccggcggcggcgaggcctcccccgcctccggcccccggcacctgatggacccccacatcttcacctccaacttcaacaacggcatcggccggcacaagacctacctgtgctacgaggtggagcggctggacaacggcacctccgtgaagatggaccagcaccggggcttcctgcacaaccaggccaagaacctgctgtgcggcttctacggccggcacgccgagctgcggttcctggacctggtgccctccctgcagctggaccccgcccagatctaccgggtgacctggttcatctcctggtccccctgcttctcctggggctgcgccggcgaggtgcgggccttcctgcaggagaacacccacgtgcggctgcggatcttcgccgcccggatctacgactacgaccccctgtacaaggaggccctgcagatgctgcgggacgccggcgcccaggtgtccatcatgacctacgacgagttcaagcactgctgggacaccttcgtggaccaccagggctgccccttccagccctgggacggcctggacgagcactcccaggccctgtccggccggctgcgggccatcctgcagaaccagggcaactccggctccgagacccccggcacctccgagtccgccacccccgagtccgcagcgttcaaaccaaatcccatcaactacatcctgggcctggccatcggcatcgcctccgtgggctgggccatggtggagatcgacgaggaggagaaccccatccggctgatcgacctgggcgtgcgggtgttcgagcgggccgaggtgcccaagaccggcgactccctggccatggcccggcggctggcccggtccgtgcggcggctgacccggcggcgggcccaccggctgctgcgggcccggcggctgctgaagcgggagggcgtgctgcaggccgccgacttcgacgagaacggcctgatcaagtccctgcccaacaccccctggcagctgcgggccgccgccctggaccggaagctgacccccctggagtggtccgccgtgctgctgcacctgatcaagcaccggggctacctgtcccagcggaagaacgagggcgagaccgccgacaaggagctgggcgccctgctgaagggcgtggccaacaacgcccacgccctgcagaccggcgacttccggacccccgccgagctggccctgaacaagttcgagaaggagtccggccacatccggaaccagcggggcgactactcccacaccttctcccggaaggacctgcaggccgagctgatcctgctgttcgagaagcagaaggagttcggcaacccccacgtgtccggcggcctgaaggagggcatcgagaccctgctgatgacccagcggcccgccctgtccggcgacgccgtgcagaagatgctgggccactgcaccttcgagcccgccgagcccaaggccgccaagaacacctacaccgccgagcggttcatctggctgaccaagctgaacaacctgcggatcctggagcagggctccgagcggcccctgaccgacaccgagcgggccaccctgatggacgagccctaccggaagtccaagctgacctacgcccaggcccggaagctgctgggcctggaggacaccgccttcttcaagggcctgcggtacggcaaggacaacgccgaggcctccaccctgatggagatgaaggcctaccacgccatctcccgggccctggagaaggagggcctgaaggacaagaagtcccccctgaacctgtcctccgagctgcaggacgagatcggcaccgccttctccctgttcaagaccgacgaggacatcaccggccggctgaaggaccgggtgcagcccgagatcctggaggccctgctgaagcacatctccttcgacaagttcgtgcagatctccctgaaggccctgcggcggatcgtgcccctgatggagcagggcaagcggtacgacgaggcctgcgccgagatctacggcgaccactacggcaagaagaacaccgaggagaagatctacctgccccccatccccgccgacgagatccggaaccccgtggtgctgcgggccctgtcccaggcccggaaggtgatcaacggcgtggtgcggcggtacggctcccccgcccggatccacatcgagaccgcccgggaggtgggcaagtccttcaaggaccggaaggagatcgagaagcggcaggaggagaaccggaaggaccgggagaaggccgccgccaagttccgggagtacttccccaacttcgtgggcgagcccaagtccaaggacatcctgaagctgcggctgtacgagcagcagcacggcaagtgcctgtactccggcaaggagatcaacctggtgcggctgaacgagaagggctacgtggagatcgaccacgccctgcccttctcccggacctgggacgactccttcaacaacaaggtgctggtgctgggctccgagaaccagaacaagggcaaccagaccccctacgagtacttcaacggcaaggacaactcccgggagtggcaggagttcaaggcccgggtggagacctcccggttcccccggtccaagaagcagcggatcctgctgcagaagttcgacgaggacggcttcaaggagtgcaacctgaacgacacccggtacgtgaaccgcttcctgtgccagttcgtggccgaccacatcctgctgaccggcaagggcaagcggcgggtgttcgcctccaacggccagatcaccaacctgctgcggggcttctggggcctgcggaaggtgcgggccgagaacgaccggcaccacgccctggacgccgtggtggtggcctgctccaccgtggccatgcagcagaagatcacccggttcgtgcggtacaaggagatgaacgccttcgacggcaagaccatcgacaaggagaccggcaaggtgctgcaccagaagacccacttcccccagccctgggagttcttcgcccaggaggtgatgatccgggtgttcggcaagcccgacggcaagcccgagttcgaggaggccgacacccccgagaagctgcggaccctgctggccgagaagctgtcctcccggcccgaggccgtgcacgagtacgtgacccccctgttcgtgtcccgggcccccaaccggaagatgtccggcgcccacaaggacaccctgcggtccgccaagcggttcgtgaagcacaacgagaagatctccgtgaagcgggtgtggctgaccgagatcaagctggccgacctggagaacatggtgaactacaagaacggccgggagatcgagctgtacgaggccctgaaggcccggctggaggcctacggcggcaacgccaagcaggccttcgaccccaaggacaaccccttctacaagaagggcggccagctggtgaaggccgtgcgggtggagaagacccaggagtccggcgtgctgctgaacaagaagaacgcctacaccatcgccgacaacggcgacatggtgcgggtggacgtgttctgcaaggtggacaagaagggcaagaaccagtacttcatcgtgcccatctacgcctggcaggtggccgagaacatcctgcccgacatcgactgcaagggctaccggatcgacgactcctacaccttctgcttctccctgcacaagtacgacctgatcgccttccagaaggacgagaagtccaaggtggagttcgcctactacatcaactgcgactcctccaacggccggttctacctggcctggcacgacaagggctccaaggagcagcagttccggatctccacccagaacctggtgctgatccagaagtaccaggtgaacgagctgggcaaggagatccggccctgccggctgaagaagcggccccccgtgcggtag

SEQ ID NO: 802 - DNA, 3363 bp, synthetic construct
  misc_feature 1..3363: note = Synthetic
  source 1..3363: mol_type = other DNA
atggacggctccggcggcggctcccccaagaagaagcggaaggtggaggacaagcggcccgccgccaccaagaaggccggccaggccaagaagaagaagggcggctccggcggcggcgccgccttcaagcccaaccccatcaactacatcctgggcctggacatcggcatcgcctccgtgggctgggccatggtggagatcgacgaggaggagaaccccatccggctgatcgacctgggcgtgcgggtgttcgagcgggccgaggtgcccaagaccggcgactccctggccatggcccggcggctggcccggtccgtgcggcggctgacccggcggcgggcccaccggctgctgcgggcccggcggctgctgaagcgggagggcgtgctgcaggccgccgacttcgacgagaacggcctgatcaagtccctgcccaacaccccctggcagctgcgggccgccgccctggaccggaagctgacccccctggagtggtccgccgtgctgctgcacctgatcaagcaccggggctacctgtcccagcggaagaacgagggcgagaccgccgacaaggagctgggcgccctgctgaagggcgtggccaacaacgcccacgccctgcagaccggcgacttccggacccccgccgagctggccctgaacaagttcgagaaggagtccggccacatccggaaccagcggggcgactactcccacaccttctcccggaaggacctgcaggccgagctgatcctgctgttcgagaagcagaaggagttcggcaacccccacgtgtccggcggcctgaaggagggcatcgagaccctgctgatgacccagcggcccgccctgtccggcgacgccgtgcagaagatgctgggccactgcaccttcgagcccgccgagcccaaggccgccaagaacacctacaccgccgagcggttcatctggctgaccaagctgaacaacctgcggatcctggagcagggctccgagcggcccctgaccgacaccgagcgggccaccctgatggacgagccctaccggaagtccaagctgacctacgcccaggcccggaagctgctgggcctggaggacaccgccttcttcaagggcctgcggtacggcaaggacaacgccgaggcctccaccctgatggagatgaaggcctaccacgccatctcccgggccctggagaaggagggcctgaaggacaagaagtcccccctgaacctgtcctccgagctgcaggacgagatcggcaccgccttctccctgttcaagaccgacgaggacatcaccggccggctgaaggaccgggtgcagcccgagatcctggaggccctgctgaagcacatctccttcgacaagttcgtgcagatctccctgaaggccctgcggcggatcgtgcccctgatggagcagggcaagcggtacgacgaggcctgcgccgagatctacggcgaccactacggcaagaagaacaccgaggagaagatctacctgccccccatccccgccgacgagatccggaaccccgtggtgctgcgggccctgtcccaggcccggaaggtgatcaacggcgtggtgcggcggtacggctcccccgcccggatccacatcgagaccgcccgggaggtgggcaagtccttcaaggaccggaaggagatcgagaagcggcaggaggagaaccggaaggaccgggagaaggccgccgccaagttccgggagtacttccccaacttcgtgggcgagcccaagtccaaggacatcctgaagctgcggctgtacgagcagcagcacggcaagtgcctgtactccggcaaggagatcaacctggtgcggctgaacgagaagggctacgtggagatcgaccacgccctgcccttctcccggacctgggacgactccttcaacaacaaggtgctggtgctgggctccgagaaccagaacaagggcaaccagaccccctacgagtacttcaacggcaaggacaactcccgggagtggcaggagttcaaggcccgggtggagacctcccggttcccccggtccaagaagcagcggatcctgctgcagaagttcgacgaggacggcttcaaggagtgcaacctgaacgacacccggtacgtgaaccggttcctgtgccagttcgtggccgaccacatcctgctgaccggcaagggcaagcggcgggtgttcgcctccaacggccagatcaccaacctgctgcggggcttctggggcctgcggaaggtgcgggccgagaacgaccggcaccacgccctggacgccgtggtggtggcctgctccaccgtggccatgcagcagaagatcacccggttcgtgcggtacaaggagatgaacgccttcgacggcaagaccatcgacaaggagaccggcaaggtgctgcaccagaagacccacttcccccagccctgggagttcttcgcccaggaggtgatgatccgggtgttcggcaagcccgacggcaagcccgagttcgaggaggccgacacccccgagaagctgcggaccctgctggccgagaagctgtcctcccggcccgaggccgtgcacgagtacgtgacccccctgttcgtgtcccgggcccccaaccggaagatgtccggcgcccacaaggacaccctgcggtccgccaagcggttcgtgaagcacaacgagaagatctccgtgaagcgggtgtggctgaccgagatcaagctggccgacctggagaacatggtgaactacaagaacggccgggagatcgagctgtacgaggccctgaaggcccggctggaggcctacggcggcaacgccaagcaggccttcgaccccaaggacaaccccttctacaagaagggcggccagctggtgaaggccgtgcgggtggagaagacccaggagtccggcgtgctgctgaacaagaagaacgcctacaccatcgccgacaacggcgacatggtgcgggtggacgtgttctgcaaggtggacaagaagggcaagaaccagtacttcatcgtgcccatctacgcctggcaggtggccgagaacatcctgcccgacatcgactgcaagggctaccggatcgacgactcctacaccttctgcttctccctgcacaagtacgacctgatcgccttccagaaggacgagaagtccaaggtggagttcgcctactacatcaactgcgactcctccaacggccggttctacctggcctggcacgacaagggctccaaggagcagcagttccggatctccacccagaacctggtgctgatccagaagtaccaggtgaacgagctgggcaaggagatccggccctgccggctgaagaagcggccccccgtgcggtag

SEQ ID NO: 803 - DNA, 3420 bp, synthetic construct
  misc_feature 1..3420: note = Synthetic
  source 1..3420: mol_type = other DNA
atggacggctccggcggcggctcccccaagaagaagcggaaggtggaggacaagcggcccgccgccaccaagaaggccggccaggccaagaagaagaagggcggctccggcggcggcgccgccttcaagcccaaccccatcaactacatcctgggcctggacatcggcatcgcctccgtgggctgggccatggtggagatcgacgaggaggagaaccccatccggctgatcgacctgggcgtgcgggtgttcgagcgggccgaggtgcccaagaccggcgactccctggccatggcccggcggctggcccggtccgtgcggcggctgacccggcggcgggcccaccggctgctgcgggcccggcggctgctgaagcgggagggcgtgctgcaggccgccgacttcgacgagaacggcctgatcaagtccctgcccaacaccccctggcagctgcgggccgccgccctggaccggaagctgacccccctggagtggtccgccgtgctgctgcacctgatcaagcaccggggctacctgtcccagcggaagaacgagggcgagaccgccgacaaggagctgggcgccctgctgaagggcgtggccaacaacgcccacgccctgcagaccggcgacttccggacccccgccgagctggccctgaacaagttcgagaaggagtccggccacatccggaaccagcggggcgactactcccacaccttctcccggaaggacctgcaggccgagctgatcctgctgttcgagaagcagaaggagttcggcaacccccacgtgtccggcggcctgaaggagggcatcgagaccctgctgatgacccagcggcccgccctgtccggcgacgccgtgcagaagatgctgggccactgcaccttcgagcccgccgagcccaaggccgccaagaacacctacaccgccgagcggttcatctggctgaccaagctgaacaacctgcggatcctggagcagggctccgagcggcccctgaccgacaccgagcgggccaccctgatggacgagccctaccggaagtccaagctgacctacgcccaggcccggaagctgctgggcctggaggacaccgccttcttcaagggcctgcggtacggcaaggacaacgccgaggcctccaccctgatggagatgaaggcctaccacgccatctcccgggccctggagaaggagggcctgaaggacaagaagtcccccctgaacctgtcctccgagctgcaggacgagatcggcaccgccttctccctgttcaagaccgacgaggacatcaccggccggctgaaggaccgggtgcagcccgagatcctggaggccctgctgaagcacatctccttcgacaagttcgtgcagatctccctgaaggccctgcggcggatcgtgcccctgatggagcagggcaagcggtacgacgaggcctgcgccgagatctacggcgaccactacggcaagaagaacaccgaggagaagatctacctgccccccatccccgccgacgagatccggaaccccgtggtgctgcgggccctgtcccaggcccggaaggtgatcaacggcgtggtgcggcggtacggctcccccgcccggatccacatcgagaccgcccgggaggtgggcaagtccttcaaggaccggaaggagatcgagaagcggcaggaggagaaccggaaggaccgggagaaggccgccgccaagttccgggagtacttccccaacttcgtgggcgagcccaagtccaaggacatcctgaagctgcggctgtacgagcagcagcacggcaagtgcctgtactccggcaaggagatcaacctggtgcggctgaacgagaagggctacgtggagatcgaccacgccctgcccttctcccggacctgggacgactccttcaacaacaaggtgctggtgctgggctccgagaaccagaacaagggcaaccagaccccctacgagtacttcaacggcaaggacaactcccgggagtggcaggagttcaaggcccgggtggagacctcccggttcccccggtccaagaagcagcggatcctgctgcagaagttcgacgaggacggcttcaaggagtgcaacctgaacgacacccggtacgtgaaccggttcctgtgccagttcgtggccgaccacatcctgctgaccggcaagggcaagcggcgggtgttcgcctccaacggccagatcaccaacctgctgcggggcttctggggcctgcggaaggtgcgggccgagaacgaccggcaccacgccctggacgccgtggtggtggcctgctccaccgtggccatgcagcagaagatcacccggttcgtgcggtacaaggagatgaacgccttcgacggcaagaccatcgacaaggagaccggcaaggtgctgcaccagaagacccacttcccccagccctgggagttcttcgcccaggaggtgatgatccgggtgttcggcaagcccgacggcaagcccgagttcgaggaggccgacacccccgagaagctgcggaccctgctggccgagaagctgtcctcccggcccgaggccgtgcacgagtacgtgacccccctgttcgtgtcccgggcccccaaccggaagatgtccggcgcccacaaggacaccctgcggtccgccaagcggttcgtgaagcacaacgagaagatctccgtgaagcgggtgtggctgaccgagatcaagctggccgacctggagaacatggtgaactacaagaacggccgggagatcgagctgtacgaggccctgaaggcccggctggaggcctacggcggcaacgccaagcaggccttcgaccccaaggacaaccccttctacaagaagggcggccagctggtgaaggccgtgcgggtggagaagacccaggagtccggcgtgctgctgaacaagaagaacgcctacaccatcgccgacaacggcgacatggtgcgggtggacgtgttctgcaaggtggacaagaagggcaagaaccagtacttcatcgtgcccatctacgcctggcaggtggccgagaacatcctgcccgacatcgactgcaagggctaccggatcgacgactcctacaccttctgcttctccctgcacaagtacgacctgatcgccttccagaaggacgagaagtccaaggtggagttcgcctactacatcaactgcgactcctccaacggccggttctacctggcctggcacgacaagggctccaaggagcagcagttccggatctccacccagaacctggtgctgatccagaagtaccaggtgaacgagctgggcaaggagatccggccctgccggctgaagaagcggccccccgtgcggtccgagtccgccacccccgagtccgtgtccggctggcggctgttcaagaagatctcctag

SEQ ID NO: 804 - DNA, 4005 bp, synthetic construct
  misc_feature 1..4005: note = Synthetic
  source 1..4005: mol_type = other DNA
atggacggctccggcggcggctcccccaagaagaagcggaaggtggaggacaagcggcccgccgccaccaagaaggccggccaggccaagaagaagaagggcggctccggcggcggcgaggcctcccccgcctccggcccccggcacctgatggacccccacatcttcacctccaacttcaacaacggcatcggccggcacaagacctacctgtgctacgaggtggagcggctggacaacggcacctccgtgaagatggaccagcaccggggcttcctgcacaaccaggccaagaacctgctgtgcggcttctacggccggcacgccgagctgcggttcctggacctggtgccctccctgcagctggaccccgcccagatctaccgggtgacctggttcatctcctggtccccctgcttctcctggggctgcgccggcgaggtgcgggccttcctgcaggagaacacccacgtgcggctgcggatcttcgccgcccggatctacgactacgaccccctgtacaaggaggccctgcagatgctgcgggacgccggcgcccaggtgtccatcatgacctacgacgagttcaagcactgctgggacaccttcgtggaccaccagggctgccccttccagccctgggacggcctggacgagcactcccaggccctgtccggccggctgcgggccatcctgcagaaccagggcaacggcaccaaggactccaccaaggacatccccgagaccccctccaaggacgcagcgttcaaaccaaatcccatcaactacatcctgggcctggccatcggcatcgcctccgtgggctgggccatggtggagatcgacgaggaggagaaccccatccggctgatcgacctgggcgtgcgggtgttcgagcgggccgaggtgcccaagaccggcgactccctggccatggcccggcggctggcccggtccgtgcggcggctgacccggcggcgggcccaccggctgctgcgggcccggcggctgctgaagcgggagggcgtgctgcaggccgccgacttcgacgagaacggcctgatcaagtccctgcccaacaccccctggcagctgcgggccgccgccctggaccggaagctgacccccctggagtggtccgccgtgctgctgcacctgatcaagcaccggggctacctgtcccagcggaagaacgagggcgagaccgccgacaaggagctgggcgccctgctgaagggcgtggccaacaacgcccacgccctgcagaccggcgacttccggacccccgccgagctggccctgaacaagttcgagaaggagtccggccacatccggaaccagcggggcgactactcccacaccttctcccggaaggacctgcaggccgagctgatcctgctgttcgagaagcagaaggagttcggcaacccccacgtgtccggcggcctgaaggagggcatcgagaccctgctgatgacccagcggcccgccctgtccggcgacgccgtgcagaagatgctgggccactgcaccttcgagcccgccgagcccaaggccgccaagaacacctacaccgccgagcggttcatctggctgaccaagctgaacaacctgcggatcctggagcagggctccgagcggcccctgaccgacaccgagcgggccaccctgatggacgagccctaccggaagtccaagctgacctacgcccaggcccggaagctgctgggcctggaggacaccgccttcttcaagggcctgcggtacggcaaggacaacgccgaggcctccaccctgatggagatgaaggcctaccacgccatctcccgggccctggagaaggagggcctgaaggacaagaagtcccccctgaacctgtcctccgagctgcaggacgagatcggcaccgccttctccctgttcaagaccgacgaggacatcaccggccggctgaaggaccgggtgcagcccgagatcctggaggccctgctgaagcacatctccttcgacaagttcgtgcagatctccctgaaggccctgcggcggatcgtgcccctgatggagcagggcaagcggtacgacgaggcctgcgccgagatctacggcgaccactacggcaagaagaacaccgaggagaagatctacctgccccccatccccgccgacgagatccggaaccccgtggtgctgcgggccctgtcccaggcccggaaggtgatcaacggcgtggtgcggcggtacggctcccccgcccggatccacatcgagaccgcccgggaggtgggcaagtccttcaaggaccggaaggagatcgagaagcggcaggaggagaaccggaaggaccgggagaaggccgccgccaagttccgggagtacttccccaacttcgtgggcgagcccaagtccaaggacatcctgaagctgcggctgtacgagcagcagcacggcaagtgcctgtactccggcaaggagatcaacctggtgcggctgaacgagaagggctacgtggagatcgaccacgccctgcccttctcccggacctgggacgactccttcaacaacaaggtgctggtgctgggctccgagaaccagaacaagggcaaccagaccccctacgagtacttcaacggcaaggacaactcccgggagtggcaggagttcaaggcccgggtggagacctcccggttcccccggtccaagaagcagcggatcctgctgcagaagttcgacgaggacggcttcaaggagtgcaacctgaacgacacccggtacgtgaaccgcttcctgtgccagttcgtggccgaccacatcctgctgaccggcaagggcaagcggcgggtgttcgcctccaacggccagatcaccaacctgctgcggggcttctggggcctgcggaaggtgcgggccgagaacgaccggcaccacgccctggacgccgtggtggtggcctgctccaccgtggccatgcagcagaagatcacccggttcgtgcggtacaaggagatgaacgccttcgacggcaagaccatcgacaaggagaccggcaaggtgctgcaccagaagacccacttcccccagccctgggagttcttcgcccaggaggtgatgatccgggtgttcggcaagcccgacggcaagcccgagttcgaggaggccgacacccccgagaagctgcggaccctgctggccgagaagctgtcctcccggcccgaggccgtgcacgagtacgtgacccccctgttcgtgtcccgggcccccaaccggaagatgtccggcgcccacaaggacaccctgcggtccgccaagcggttcgtgaagcacaacgagaagatctccgtgaagcgggtgtggctgaccgagatcaagctggccgacctggagaacatggtgaactacaagaacggccgggagatcgagctgtacgaggccctgaaggcccggctggaggcctacggcggcaacgccaagcaggccttcgaccccaaggacaaccccttctacaagaagggcggccagctggtgaaggccgtgcgggtggagaagacccaggagtccggcgtgctgctgaacaagaagaacgcctacaccatcgccgacaacggcgacatggtgcgggtggacgtgttctgcaaggtggacaagaagggcaagaaccagtacttcatcgtgcccatctacgcctggcaggtggccgagaacatcctgcccgacatcgactgcaagggctaccggatcgacgactcctacaccttctgcttctccctgcacaagtacgacctgatcgccttccagaaggacgagaagtccaaggtggagttcgcctactacatcaactgcgactcctccaacggccggttctacctggcctggcacgacaagggctccaaggagcagcagttccggatctccacccagaacctggtgctgatccagaagtaccaggtgaacgagctgggcaaggagatccggccctgccggctgaagaagcggccccccgtgcggtag

SEQ ID NO: 805 - DNA, 3249 bp, synthetic construct
  misc_feature 1..3249: note = Synthetic
  modified_base 3247: mod_base = OTHER; note = uracil
  source 1..3249: mol_type = other DNA
atggctgcttttaagcctaatcctattaattatattcttggtcttgatattggtattgcttctgttggttgggctatggttgagattgatgaggaggagaatcctattcgtcttattgatcttggtgttcgtgtttttgagcgtgctgaggttcctaagactggtgattctcttgctatggctcgtcgtcttgctcgttctgttcgtcgtcttactcgtcgtcgtgctcatcgtcttcttcgtgctcgtcgtcttcttaagcgtgagggtgttcttcaggctgctgattttgatgagaatggtcttattaagtctcttcctaatactccttggcagcttcgtgctgctgctcttgatcgtaagcttactcctcttgagtggtctgctgttcttcttcatcttattaagcatcgtggttatctttctcagcgtaagaatgagggtgagactgctgataaggagcttggtgctcttcttaagggtgttgctaataatgctcatgctcttcagactggtgattttcgtactcctgctgagcttgctcttaataagtttgagaaggagtctggtcatattcgtaatcagcgtggtgattattctcatactttttctcgtaaggatcttcaggctgagcttattcttctttttgagaagcagaaggagtttggtaatcctcatgtttctggtggtcttaaggagggtattgagactcttcttatgactcagcgtcctgctctttctggtgatgctgttcagaagatgcttggtcattgtacttttgagcctgctgagcctaaggctgctaagaatacttatactgctgagcgttttatttggcttactaagcttaataatcttcgtattcttgagcagggttctgagcgtcctcttactgatactgagcgtgctactcttatggatgagccttatcgtaagtctaagcttacttatgctcaggctcgtaagcttcttggtcttgaggatactgctttttttaagggtcttcgttatggtaaggataatgctgaggcttctactcttatggagatgaaggcttatcatgctatttctcgtgctcttgagaaggagggtcttaaggataagaagtctcctcttaatctttcttctgagcttcaggatgagattggtactgctttttctctttttaagactgatgaggatattactggtcgtcttaaggatcgtgttcagcctgagattcttgaggctcttcttaagcatatttcttttgataagtttgttcagatttctcttaaggctcttcgtcgtattgttcctcttatggagcagggtaagcgttatgatgaggcttgtgctgagatttatggtgatcattatggtaagaagaatactgaggagaagatttatcttcctcctattcctgctgatgagattcgtaatcctgttgttcttcgtgctctttctcaggctcgtaaggttattaatggtgttgttcgtcgttatggttctcctgctcgtattcatattgagactgctcgtgaggttggtaagtcttttaaggatcgtaaggagattgagaagcgtcaggaggagaatcgtaaggatcgtgagaaggctgctgctaagtttcgtgagtattttcctaattttgttggtgagcctaagtctaaggatattcttaagcttcgtctttatgagcagcagcatggtaagtgtctttattctggtaaggagattaatcttgttcgtcttaatgagaagggttatgttgagattgatcatgctcttcctttttctcgtacttgggatgattcttttaataataaggttcttgttcttggttctgagaatcagaataagggtaatcagactccttatgagtattttaatggtaaggataattctcgtgagtggcaggagtttaaggctcgtgttgagacttctcgttttcctcgttctaagaagcagcgtattcttcttcagaagtttgatgaggatggttttaaggagtgtaatcttaatgatactcgttatgttaatcgttttctttgtcagtttgttgctgatcatattcttcttactggtaagggtaagcgtcgtgtttttgcttctaatggtcagattactaatcttcttcgtggtttttggggtcttcgtaaggttcgtgctgagaatgatcgtcatcatgctcttgatgctgttgttgttgcttgttctactgttgctatgcagcagaagattactcgttttgttcgttataaggagatgaatgcttttgatggtaagactattgataaggagactggtaaggttcttcatcagaagactcattttcctcagccttgggagttttttgctcaggaggttatgattcgtgtttttggtaagcctgatggtaagcctgagtttgaggaggctgatactcctgagaagcttcgtactcttcttgctgagaagctttcttctcgtcctgaggctgttcatgagtatgttactcctctttttgtttctcgtgctcctaatcgtaagatgtctggtgctcataaggatactcttcgttctgctaagcgttttgttaagcataatgagaagatttctgttaagcgtgtttggcttactgagattaagcttgctgatcttgagaatatggttaattataagaatggtcgtgagattgagctttatgaggctcttaaggctcgtcttgaggcttatggtggtaatgctaagcaggcttttgatcctaaggataatcctttttataagaagggtggtcagcttgttaaggctgttcgtgttgagaagactcaggagtctggtgttcttcttaataagaagaatgcttatactattgctgataatggtgatatggttcgtgttgatgttttttgtaaggttgataagaagggtaagaatcagtattttattgttcctatttatgcttggcaggttgctgagaatattcttcctgatattgattgtaagggttatcgtattgatgattcttatactttttgtttttctcttcataagtatgatcttattgcttttcagaaggatgagaagtctaaggttgagtttgcttattatattaattgtgattcttctaatggtcgtttttatcttgcttggcatgataagggttctaaggagcagcagtttcgtatttctactcagaatcttgttcttattcagaagtatcaggttaatgagcttggtaaggagattcgtccttgtcgtcttaagaagcgtcctcctgttcgttga

SEQ ID NO: 806 - DNA, 3249 bp, synthetic construct
  misc_feature 1..3249: note = Synthetic
  modified_base 3247: mod_base = OTHER; note = uracil
  source 1..3249: mol_type = other DNA
atggccgccttcaagcccaaccccatcaactacatcctgggcctggacatcggcatcgcctccgtgggctgggccatggtggagatcgacgaggaggagaaccccatccggctgatcgacctgggcgtgcgggtgttcgagcgggccgaggtgcccaagaccggcgactccctggccatggcccggcggctggcccggtccgtgcggcggctgacccggcggcgggcccaccggctgctgcgggcccggcggctgctgaagcgggagggcgtgctgcaggccgccgacttcgacgagaacggcctgatcaagtccctgcccaacaccccctggcagctgcgggccgccgccctggaccggaagctgacccccctggagtggtccgccgtgctgctgcacctgatcaagcaccggggctacctgtcccagcggaagaacgagggcgagaccgccgacaaggagctgggcgccctgctgaagggcgtggccaacaacgcccacgccctgcagaccggcgacttccggacccccgccgagctggccctgaacaagttcgagaaggagtccggccacatccggaaccagcggggcgactactcccacaccttctcccggaaggacctgcaggccgagctgatcctgctgttcgagaagcagaaggagttcggcaacccccacgtgtccggcggcctgaaggagggcatcgagaccctgctgatgacccagcggcccgccctgtccggcgacgccgtgcagaagatgctgggccactgcaccttcgagcccgccgagcccaaggccgccaagaacacctacaccgccgagcggttcatctggctgaccaagctgaacaacctgcggatcctggagcagggctccgagcggcccctgaccgacaccgagcgggccaccctgatggacgagccctaccggaagtccaagctgacctacgcccaggcccggaagctgctgggcctggaggacaccgccttcttcaagggcctgcggtacggcaaggacaacgccgaggcctccaccctgatggagatgaaggcctaccacgccatctcccgggccctggagaaggagggcctgaaggacaagaagtcccccctgaacctgtcctccgagctgcaggacgagatcggcaccgccttctccctgttcaagaccgacgaggacatcaccggccggctgaaggaccgggtgcagcccgagatcctggaggccctgctgaagcacatctccttcgacaagttcgtgcagatctccctgaaggccctgcggcggatcgtgcccctgatggagcagggcaagcggtacgacgaggcctgcgccgagatctacggcgaccactacggcaagaagaacaccgaggagaagatctacctgccccccatccccgccgacgagatccggaaccccgtggtgctgcgggccctgtcccaggcccggaaggtgatcaacggcgtggtgcggcggtacggctcccccgcccggatccacatcgagaccgcccgggaggtgggcaagtccttcaaggaccggaaggagatcgagaagcggcaggaggagaaccggaaggaccgggagaaggccgccgccaagttccgggagtacttccccaacttcgtgggcgagcccaagtccaaggacatcctgaagctgcggctgtacgagcagcagcacggcaagtgcctgtactccggcaaggagatcaacctggtgcggctgaacgagaagggctacgtggagatcgaccacgccctgcccttctcccggacctgggacgactccttcaacaacaaggtgctggtgctgggctccgagaaccagaacaagggcaaccagaccccctacgagtacttcaacggcaaggacaactcccgggagtggcaggagttcaaggcccgggtggagacctcccggttcccccggtccaagaagcagcggatcctgctgcagaagttcgacgaggacggcttcaaggagtgcaacctgaacgacacccggtacgtgaaccggttcctgtgccagttcgtggccgaccacatcctgctgaccggcaagggcaagcggcgggtgttcgcctccaacggccagatcaccaacctgctgcggggcttctggggcctgcggaaggtgcgggccgagaacgaccggcaccacgccctggacgccgtggtggtggcctgctccaccgtggccatgcagcagaagatcacccggttcgtgcggtacaaggagatgaacgccttcgacggcaagaccatcgacaaggagaccggcaaggtgctgcaccagaagacccacttcccccagccctgggagttcttcgcccaggaggtgatgatccgggtgttcggcaagcccgacggcaagcccgagttcgaggaggccgacacccccgagaagctgcggaccctgctggccgagaagctgtcctcccggcccgaggccgtgcacgagtacgtgacccccctgttcgtgtcccgggcccccaaccggaagatgtccggcgcccacaaggacaccctgcggtccgccaagcggttcgtgaagcacaacgagaagatctccgtgaagcgggtgtggctgaccgagatcaagctggccgacctggagaacatggtgaactacaagaacggccgggagatcgagctgtacgaggccctgaaggcccggctggaggcctacggcggcaacgccaagcaggccttcgaccccaaggacaaccccttctacaagaagggcggccagctggtgaaggccgtgcgggtggagaagacccaggagtccggcgtgctgctgaacaagaagaacgcctacaccatcgccgacaacggcgacatggtgcgggtggacgtgttctgcaaggtggacaagaagggcaagaaccagtacttcatcgtgcccatctacgcctggcaggtggccgagaacatcctgcccgacatcgactgcaagggctaccggatcgacgactcctacaccttctgcttctccctgcacaagtacgacctgatcgccttccagaaggacgagaagtccaaggtggagttcgcctactacatcaactgcgactcctccaacggccggttctacctggcctggcacgacaagggctccaaggagcagcagttccggatctccacccagaacctggtgctgatccagaagtaccaggtgaacgagctgggcaaggagatccggccctgccggctgaagaagcggccccccgtgcggtga

SEQ ID NO: 807 - DNA, 3249 bp, synthetic construct
  misc_feature 1..3249: note = Synthetic
  modified_base 3247: mod_base = OTHER; note = uracil
  source 1..3249: mol_type = other DNA
atggcagcattcaaaccaaacccaatcaactacatcctaggactagacatcggaatcgcatcagtaggatgagcaatggtagaaatcgacgaagaagaaaacccaatccgactaatcgacctaggagtacgagtattcgaacgagcagaagtaccaaaaacaggagactcactagcaatggcacgacgactagcacgatcagtacgacgactaacacgacgacgagcacaccgactactacgagcacgacgactactaaaacgagaaggagtactacaagcagcagacttcgacgaaaacggactaatcaaatcactaccaaacacaccatgacaactacgagcagcagcactagaccgaaaactaacaccactagaatgatcagcagtactactacacctaatcaaacaccgaggatacctatcacaacgaaaaaacgaaggagaaacagcagacaaagaactaggagcactactaaaaggagtagcaaacaacgcacacgcactacaaacaggagacttccgaacaccagcagaactagcactaaacaaattcgaaaaagaatcaggacacatccgaaaccaacgaggagactactcacacacattctcacgaaaagacctacaagcagaactaatcctactattcgaaaaacaaaaagaattcggaaacccacacgtatcaggaggactaaaagaaggaatcgaaacactactaatgacacaacgaccagcactatcaggagacgcagtacaaaaaatgctaggacactgcacattcgaaccagcagaaccaaaagcagcaaaaaacacatacacagcagaacgattcatctgactaacaaaactaaacaacctacgaatcctagaacaaggatcagaacgaccactaacagacacagaacgagcaacactaatggacgaaccataccgaaaatcaaaactaacatacgcacaagcacgaaaactactaggactagaagacacagcattcttcaaaggactacgatacggaaaagacaacgcagaagcatcaacactaatggaaatgaaagcataccacgcaatctcacgagcactagaaaaagaaggactaaaagacaaaaaatcaccactaaacctatcatcagaactacaagacgaaatcggaacagcattctcactattcaaaacagacgaagacatcacaggacgactaaaagaccgagtacaaccagaaatcctagaagcactactaaaacacatctcattcgacaaattcgtacaaatctcactaaaagcactacgacgaatcgtaccactaatggaacaaggaaaacgatacgacgaagcatgcgcagaaatctacggagaccactacggaaaaaaaaacacagaagaaaaaatctacctaccaccaatcccagcagacgaaatccgaaacccagtagtactacgagcactatcacaagcacgaaaagtaatcaacggagtagtacgacgatacggatcaccagcacgaatccacatcgaaacagcacgagaagtaggaaaatcattcaaagaccgaaaagaaatcgaaaaacgacaagaagaaaaccgaaaagaccgagaaaaagcagcagcaaaattccgagaatacttcccaaacttcgtaggagaaccaaaatcaaaagacatcctaaaactacgactatacgaacaacaacacggaaaatgcctatactcaggaaaagaaatcaacctagtacgactaaacgaaaaaggatacgtagaaatcgaccacgcactaccattctcacgaacatgagacgactcattcaacaacaaagtactagtactaggatcagaaaaccaaaacaaaggaaaccaaacaccatacgaatacttcaacggaaaagacaactcacgagaatgacaagaattcaaagcacgagtagaaacatcacgattcccacgatcaaaaaaacaacgaatcctactacaaaaattcgacgaagacggattcaaagaatgcaacctaaacgacacacgatacgtaaaccgattcctatgccaattcgtagcagaccacatcctactaacaggaaaaggaaaacgacgagtattcgcatcaaacggacaaatcacaaacctactacgaggattctgaggactacgaaaagtacgagcagaaaacgaccgacaccacgcactagacgcagtagtagtagcatgctcaacagtagcaatgcaacaaaaaatcacacgattcgtacgatacaaagaaatgaacgcattcgacggaaaaacaatcgacaaagaaacaggaaaagtactacaccaaaaaacacacttcccacaaccatgagaattcttcgcacaagaagtaatgatccgagtattcggaaaaccagacggaaaaccagaattcgaagaagcagacacaccagaaaaactacgaacactactagcagaaaaactatcatcacgaccagaagcagtacacgaatacgtaacaccactattcgtatcacgagcaccaaaccgaaaaatgtcaggagcacacaaagacacactacgatcagcaaaacgattcgtaaaacacaacgaaaaaatctcagtaaaacgagtatgactaacagaaatcaaactagcagacctagaaaacatggtaaactacaaaaacggacgagaaatcgaactatacgaagcactaaaagcacgactagaagcatacggaggaaacgcaaaacaagcattcgacccaaaagacaacccattctacaaaaaaggaggacaactagtaaaagcagtacgagtagaaaaaacacaagaatcaggagtactactaaacaaaaaaaacgcatacacaatcgcagacaacggagacatggtacgagtagacgtattctgcaaagtagacaaaaaaggaaaaaaccaatacttcatcgtaccaatctacgcatgacaagtagcagaaaacatcctaccagacatcgactgcaaaggataccgaatcgacgactcatacacattctgcttctcactacacaaatacgacctaatcgcattccaaaaagacgaaaaatcaaaagtagaattcgcatactacatcaactgcgactcatcaaacggacgattctacctagcatgacacgacaaaggatcaaaagaacaacaattccgaatctcaacacaaaacctagtactaatccaaaaataccaagtaaacgaactaggaaaagaaatccgaccatgccgactaaaaaaacgaccaccagtacgataa

SEQ ID NO: 808 - DNA, 3249 bp, synthetic construct
  misc_feature 1..3249: note = Synthetic
  modified_base 3247: mod_base = OTHER; note = uracil
  source 1..3249: mol_type = other DNA
atggctgcttttaagcctaatcctattaattatattcttggtcttgctattggtattgcttctgttggttgggctatggttgagattgatgaggaggagaatcctattcgtcttattgatcttggtgttcgtgtttttgagcgtgctgaggttcctaagactggtgattctcttgctatggctcgtcgtcttgctcgttctgttcgtcgtcttactcgtcgtcgtgctcatcgtcttcttcgtgctcgtcgtcttcttaagcgtgagggtgttcttcaggctgctgattttgatgagaatggtcttattaagtctcttcctaatactccttggcagcttcgtgctgctgctcttgatcgtaagcttactcctcttgagtggtctgctgttcttcttcatcttattaagcatcgtggttatctttctcagcgtaagaatgagggtgagactgctgataaggagcttggtgctcttcttaagggtgttgctaataatgctcatgctcttcagactggtgattttcgtactcctgctgagcttgctcttaataagtttgagaaggagtctggtcatattcgtaatcagcgtggtgattattctcatactttttctcgtaaggatcttcaggctgagcttattcttctttttgagaagcagaaggagtttggtaatcctcatgtttctggtggtcttaaggagggtattgagactcttcttatgactcagcgtcctgctctttctggtgatgctgttcagaagatgcttggtcattgtacttttgagcctgctgagcctaaggctgctaagaatacttatactgctgagcgttttatttggcttactaagcttaataatcttcgtattcttgagcagggttctgagcgtcctcttactgatactgagcgtgctactcttatggatgagccttatcgtaagtctaagcttacttatgctcaggctcgtaagcttcttggtcttgaggatactgctttttttaagggtcttcgttatggtaaggataatgctgaggcttctactcttatggagatgaaggcttatcatgctatttctcgtgctcttgagaaggagggtcttaaggataagaagtctcctcttaatctttcttctgagcttcaggatgagattggtactgctttttctctttttaagactgatgaggatattactggtcgtcttaaggatcgtgttcagcctgagattcttgaggctcttcttaagcatatttcttttgataagtttgttcagatttctcttaaggctcttcgtcgtattgttcctcttatggagcagggtaagcgttatgatgaggcttgtgctgagatttatggtgatcattatggtaagaagaatactgaggagaagatttatcttcctcctattcctgctgatgagattcgtaatcctgttgttcttcgtgctctttctcaggctcgtaaggttattaatggtgttgttcgtcgttatggttctcctgctcgtattcatattgagactgctcgtgaggttggtaagtcttttaaggatcgtaaggagattgagaagcgtcaggaggagaatcgtaaggatcgtgagaaggctgctgctaagtttcgtgagtattttcctaattttgttggtgagcctaagtctaaggatattcttaagcttcgtctttatgagcagcagcatggtaagtgtctttattctggtaaggagattaatcttgttcgtcttaatgagaagggttatgttgagattgatcatgctcttcctttttctcgtacttgggatgattcttttaataataaggttcttgttcttggttctgagaatcagaataagggtaatcagactccttatgagtattttaatggtaaggataattctcgtgagtggcaggagtttaaggctcgtgttgagacttctcgttttcctcgttctaagaagcagcgtattcttcttcagaagtttgatgaggatggttttaaggagtgtaatcttaatgatactcgttatgttaatcgttttctttgtcagtttgttgctgatcatattcttcttactggtaagggtaagcgtcgtgtttttgcttctaatggtcagattactaatcttcttcgtggtttttggggtcttcgtaaggttcgtgctgagaatgatcgtcatcatgctcttgatgctgttgttgttgcttgttctactgttgctatgcagcagaagattactcgttttgttcgttataaggagatgaatgcttttgatggtaagactattgataaggagactggtaaggttcttcatcagaagactcattttcctcagccttgggagttttttgctcaggaggttatgattcgtgtttttggtaagcctgatggtaagcctgagtttgaggaggctgatactcctgagaagcttcgtactcttcttgctgagaagctttcttctcgtcctgaggctgttcatgagtatgttactcctctttttgtttctcgtgctcctaatcgtaagatgtctggtgctcataaggatactcttcgttctgctaagcgttttgttaagcataatgagaagatttctgttaagcgtgtttggcttactgagattaagcttgctgatcttgagaatatggttaattataagaatggtcgtgagattgagctttatgaggctcttaaggctcgtcttgaggcttatggtggtaatgctaagcaggcttttgatcctaaggataatcctttttataagaagggtggtcagcttgttaaggctgttcgtgttgagaagactcaggagtctggtgttcttcttaataagaagaatgcttatactattgctgataatggtgatatggttcgtgttgatgttttttgtaaggttgataagaagggtaagaatcagtattttattgttcctatttatgcttggcaggttgctgagaatattcttcctgatattgattgtaagggttatcgtattgatgattcttatactttttgtttttctcttcataagtatgatcttattgcttttcagaaggatgagaagtctaaggttgagtttgcttattatattaattgtgattcttctaatggtcgtttttatcttgcttggcatgataagggttctaaggagcagcagtttcgtatttctactcagaatcttgttcttattcagaagtatcaggttaatgagcttggtaaggagattcgtccttgtcgtcttaagaagcgtcctcctgttcgttga

SEQ ID NO: 809 - DNA, 3249 bp, synthetic construct
  misc_feature 1..3249: note = Synthetic
  modified_base 3247: mod_base = OTHER; note = uracil
  source 1..3249: mol_type = other DNA
atggccgccttcaagcccaaccccatcaactacatcctgggcctggccatcggcatcgcctccgtgggctgggccatggtggagatcgacgaggaggagaaccccatccggctgatcgacctgggcgtgcgggtgttcgagcgggccgaggtgcccaagaccggcgactccctggccatggcccggcggctggcccggtccgtgcggcggctgacccggcggcgggcccaccggctgctgcgggcccggcggctgctgaagcgggagggcgtgctgcaggccgccgacttcgacgagaacggcctgatcaagtccctgcccaacaccccctggcagctgcgggccgccgccctggaccggaagctgacccccctggagtggtccgccgtgctgctgcacctgatcaagcaccggggctacctgtcccagcggaagaacgagggcgagaccgccgacaaggagctgggcgccctgctgaagggcgtggccaacaacgcccacgccctgcagaccggcgacttccggacccccgccgagctggccctgaacaagttcgagaaggagtccggccacatccggaaccagcggggcgactactcccacaccttctcccggaaggacctgcaggccgagctgatcctgctgttcgagaagcagaaggagttcggcaacccccacgtgtccggcggcctgaaggagggcatcgagaccctgctgatgacccagcggcccgccctgtccggcgacgccgtgcagaagatgctgggccactgcaccttcgagcccgccgagcccaaggccgccaagaacacctacaccgccgagcggttcatctggctgaccaagctgaacaacctgcggatcctggagcagggctccgagcggcccctgaccgacaccgagcgggccaccctgatggacgagccctaccggaagtccaagctgacctacgcccaggcccggaagctgctgggcctggaggacaccgccttcttcaagggcctgcggtacggcaaggacaacgccgaggcctccaccctgatggagatgaaggcctaccacgccatctcccgggccctggagaaggagggcctgaaggacaagaagtcccccctgaacctgtcctccgagctgcaggacgagatcggcaccgccttctccctgttcaagaccgacgaggacatcaccggccggctgaaggaccgggtgcagcccgagatcctggaggccctgctgaagcacatctccttcgacaagttcgtgcagatctccctgaaggccctgcggcggatcgtgcccctgatggagcagggcaagcggtacgacgaggcctgcgccgagatctacggcgaccactacggcaagaagaacaccgaggagaagatctacctgccccccatccccgccgacgagatccggaaccccgtggtgctgcgggccctgtcccaggcccggaaggtgatcaacggcgtggtgcggcggtacggctcccccgcccggatccacatcgagaccgcccgggaggtgggcaagtccttcaaggaccggaaggagatcgagaagcggcaggaggagaaccggaaggaccgggagaaggccgccgccaagttccgggagtacttccccaacttcgtgggcgagcccaagtccaaggacatcctgaagctgcggctgtacgagcagcagcacggcaagtgcctgtactccggcaaggagatcaacctggtgcggctgaacgagaagggctacgtggagatcgaccacgccctgcccttctcccggacctgggacgactccttcaacaacaaggtgctggtgctgggctccgagaaccagaacaagggcaaccagaccccctacgagtacttcaacggcaaggacaactcccgggagtggcaggagttcaaggcccgggtggagacctcccggttcccccggtccaagaagcagcggatcctgctgcagaagttcgacgaggacggcttcaaggagtgcaacctgaacgacacccggtacgtgaaccggttcctgtgccagttcgtggccgaccacatcctgctgaccggcaagggcaagcggcgggtgttcgcctccaacggccagatcaccaacctgctgcggggcttctggggcctgcggaaggtgcgggccgagaacgaccggcaccacgccctggacgccgtggtggtggcctgctccaccgtggccatgcagcagaagatcacccggttcgtgcggtacaaggagatgaacgccttcgacggcaagaccatcgacaaggagaccggcaaggtgctgcaccagaagacccacttcccccagccctgggagttcttcgcccaggaggtgatgatccgggtgttcggcaagcccgacggcaagcccgagttcgaggaggccgacacccccgagaagctgcggaccctgctggccgagaagctgtcctcccggcccgaggccgtgcacgagtacgtgacccccctgttcgtgtcccgggcccccaaccggaagatgtccggcgcccacaaggacaccctgcggtccgccaagcggttcgtgaagcacaacgagaagatctccgtgaagcgggtgtggctgaccgagatcaagctggccgacctggagaacatggtgaactacaagaacggccgggagatcgagctgtacgaggccctgaaggcccggctggaggcctacggcggcaacgccaagcaggccttcgaccccaaggacaaccccttctacaagaagggcggccagctggtgaaggccgtgcgggtggagaagacccaggagtccggcgtgctgctgaacaagaagaacgcctacaccatcgccgacaacggcgacatggtgcgggtggacgtgttctgcaaggtggacaagaagggcaagaaccagtacttcatcgtgcccatctacgcctggcaggtggccgagaacatcctgcccgacatcgactgcaagggctaccggatcgacgactcctacaccttctgcttctccctgcacaagtacgacctgatcgccttccagaaggacgagaagtccaaggtggagttcgcctactacatcaactgcgactcctccaacggccggttctacctggcctggcacgacaagggctccaaggagcagcagttccggatctccacccagaacctggtgctgatccagaagtaccaggtgaacgagctgggcaaggagatccggccctgccggctgaagaagcggccccccgtgcggtga

SEQ ID NO: 810 - DNA, 3249 bp, synthetic construct
  misc_feature 1..3249: note = Synthetic
  modified_base 3247: mod_base = OTHER; note = uracil
  source 1..3249: mol_type = other DNA
atggccgccttcaagcccaaccccatcaactacatcctgggcctggccatcggcatcgcctccgtgggctgggccatggtggagatcgacgaggaggagaaccccatccggctgatcgacctgggcgtgcgggtgttcgagcgggccgaggtgcccaagaccggcgactccctggccatggcccggcggctggcccggtccgtgcggcggctgacccggcggcgggcccaccggctgctgcgggcccggcggctgctgaagcgggagggcgtgctgcaggccgccgacttcgacgagaacggcctgatcaagtccctgcccaacaccccctggcagctgcgggccgccgccctggaccggaagctgacccccctggagtggtccgccgtgctgctgcacctgatcaagcaccggggctacctgtcccagcggaagaacgagggcgagaccgccgacaaggagctgggcgccctgctgaagggcgtggccaacaacgcccacgccctgcagaccggcgacttccggacccccgccgagctggccctgaacaagttcgagaaggagtccggccacatccggaaccagcggggcgactactcccacaccttctcccggaaggacctgcaggccgagctgatcctgctgttcgagaagcagaaggagttcggcaacccccacgtgtccggcggcctgaaggagggcatcgagaccctgctgatgacccagcggcccgccctgtccggcgacgccgtgcagaagatgctgggccactgcaccttcgagcccgccgagcccaaggccgccaagaacacctacaccgccgagcggttcatctggctgaccaagctgaacaacctgcggatcctggagcagggctccgagcggcccctgaccgacaccgagcgggccaccctgatggacgagccctaccggaagtccaagctgacctacgcccaggcccggaagctgctgggcctggaggacaccgccttcttcaagggcctgcggtacggcaaggacaacgccgaggcctccaccctgatggagatgaaggcctaccacgccatctcccgggccctggagaaggagggcctgaaggacaagaagtcccccctgaacctgtcctccgagctgcaggacgagatcggcaccgccttctccctgttcaagaccgacgaggacatcaccggccggctgaaggaccgggtgcagcccgagatcctggaggccctgctgaagcacatctccttcgacaagttcgtgcagatctccctgaaggccctgcggcggatcgtgcccctgatggagcagggcaagcggtacgacgaggcctgcgccgagatctacggcgaccactacggcaagaagaacaccgaggagaagatctacctgccccccatccccgccgacgagatccggaaccccgtggtgctgcgggccctgtcccaggcccggaaggtgatcaacggcgtggtgcggcggtacggctcccccgcccggatccacatcgagaccgcccgggaggtgggcaagtccttcaaggaccggaaggagatcgagaagcggcaggaggagaaccggaaggaccgggagaaggccgccgccaagttccgggagtacttccccaacttcgtgggcgagcccaagtccaaggacatcctgaagctgcggctgtacgagcagcagcacggcaagtgcctgtactccggcaaggagatcaacctggtgcggctgaacgagaagggctacgtggagatcgaccacgccctgcccttctcccggacctgggacgactccttcaacaacaaggtgctggtgctgggctccgagaaccagaacaagggcaaccagaccccctacgagtacttcaacggcaaggacaactcccgggagtggcaggagttcaaggcccgggtggagacctcccggttcccccggtccaagaagcagcggatcctgctgcagaagttcgacgaggacggcttcaaggagtgcaacctgaacgacacccggtacgtgaaccggttcctgtgccagttcgtggccgaccacatcctgctgaccggcaagggcaagcggcgggtgttcgcctccaacggccagatcaccaacctgctgcggggcttctggggcctgcggaaggtgcgggccgagaacgaccggcaccacgccctggacgccgtggtggtggcctgctccaccgtggccatgcagcagaagatcacccggttcgtgcggtacaaggagatgaacgccttcgacggcaagaccatcgacaaggagaccggcaaggtgctgcaccagaagacccacttcccccagccctgggagttcttcgcccaggaggtgatgatccgggtgttcggcaagcccgacggcaagcccgagttcgaggaggccgacacccccgagaagctgcggaccctgctggccgagaagctgtcctcccggcccgaggccgtgcacgagtacgtgacccccctgttcgtgtcccgggcccccaaccggaagatgtccggcgcccacaaggacaccctgcggtccgccaagcggttcgtgaagcacaacgagaagatctccgtgaagcgggtgtggctgaccgagatcaagctggccgacctggagaacatggtgaactacaagaacggccgggagatcgagctgtacgaggccctgaaggcccggctggaggcctacggcggcaacgccaagcaggccttcgaccccaaggacaaccccttctacaagaagggcggccagctggtgaaggccgtgcgggtggagaagacccaggagtccggcgtgctgctgaacaagaagaacgcctacaccatcgccgacaacggcgacatggtgcgggtggacgtgttctgcaaggtggacaagaagggcaagaaccagtacttcatcgtgcccatctacgcctggcaggtggccgagaacatcctgcccgacatcgactgcaagggctaccggatcgacgactcctacaccttctgcttctccctgcacaagtacgacctgatcgccttccagaaggacgagaagtccaaggtggagttcgcctactacatcaactgcgactcctccaacggccggttctacctggcctggcacgacaagggctccaaggagcagcagttccggatctccacccagaacctggtgctgatccagaagtaccaggtgaacgagctgggcaaggagatccggccctgccggctgaagaagcggccccccgtgcggtaa

SEQ ID NO: 811 - DNA, 4782 bp, synthetic construct
  misc_feature 1..4782: note = Synthetic
  source 1..4782: mol_type = other DNA
atggaggcctcccccgcctccggcccccggcacctgatggacccccacatcttcacctccaacttcaacaacggcatcggccggcacaagacctacctgtgctacgaggtggagcggctggacaacggcacctccgtgaagatggaccagcaccggggcttcctgcacaaccaggccaagaacctgctgtgcggcttctacggccggcacgccgagctgcggttcctggacctggtgccctccctgcagctggaccccgcccagatctaccgggtgacctggttcatctcctggtccccctgcttctcctggggctgcgccggcgaggtgcgggccttcctgcaggagaacacccacgtgcggctgcggatcttcgccgcccggatctacgactacgaccccctgtacaaggaggccctgcagatgctgcgggacgccggcgcccaggtgtccatcatgacctacgacgagttcaagcactgctgggacaccttcgtggaccaccagggctgccccttccagccctgggacggcctggacgagcactcccaggccctgtccggccggctgcgggccatcctgcagaaccagggcaactccggctccgagacccccggcacctccgagtccgccacccccgagtccgacaagaagtactccatcggcctggccatcggcaccaactccgtgggctgggccgtgatcaccgacgagtacaaggtgccctccaagaagttcaaggtgctgggcaacaccgaccggcactccatcaagaagaacctgatcggcgccctgctgttcgactccggcgagaccgccgaggccacccggctgaagcggaccgcccggcggcggtacacccggcggaagaaccggatctgctacctgcaggagatcttctccaacgagatggccaaggtggacgactccttcttccaccggctggaggagtccttcctggtggaggaggacaagaagcacgagcggcaccccatcttcggcaacatcgtggacgaggtggcctaccacgagaagtaccccaccatctaccacctgcggaagaagctggtggactccaccgacaaggccgacctgcggctgatctacctggccctggcccacatgatcaagttccggggccacttcctgatcgagggcgacctgaaccccgacaactccgacgtggacaagctgttcatccagctggtgcagacctacaaccagctgttcgaggagaaccccatcaacgcctccggcgtggacgccaaggccatcctgtccgcccggctgtccaagtcccggcggctggagaacctgatcgcccagctgcccggcgagaagaagaacggcctgttcggcaacctgatcgccctgtccctgggcctgacccccaacttcaagtccaacttcgacctggccgaggacgccaagctgcagctgtccaaggacacctacgacgacgacctggacaacctgctggcccagatcggcgaccagtacgccgacctgttcctggccgccaagaacctgtccgacgccatcctgctgtccgacatcctgcgggtgaacaccgagatcaccaaggcccccctgtccgcctccatgatcaagcggtacgacgagcaccaccaggacctgaccctgctgaaggccctggtgcggcagcagctgcccgagaagtacaaggagatcttcttcgaccagtccaagaacggctacgccggctacatcgacggcggcgcctcccaggaggagttctacaagttcatcaagcccatcctggagaagatggacggcaccgaggagctgctggtgaagctgaaccgggaggacctgctgcggaagcagcggaccttcgacaacggctccatcccccaccagatccacctgggcgagctgcacgccatcctgcggcggcaggaggacttctaccccttcctgaaggacaaccgggagaagatcgagaagatcctgaccttccggatcccctactacgtgggccccctggcccggggcaactcccggttcgcctggatgacccggaagtccgaggagaccatcaccccctggaacttcgaggaggtggtggacaagggcgcctccgcccagtccttcatcgagcggatgaccaacttcgacaagaacctgcccaacgagaaggtgctgcccaagcactccctgctgtacgagtacttcaccgtgtacaacgagctgaccaaggtgaagtacgtgaccgagggcatgcggaagcccgccttcctgtccggcgagcagaagaaggccatcgtggacctgctgttcaagaccaaccggaaggtgaccgtgaagcagctgaaggaggactacttcaagaagatcgagtgcttcgactccgtggagatctccggcgtggaggaccggttcaacgcctccctgggcacctaccacgacctgctgaagatcatcaaggacaaggacttcctggacaacgaggagaacgaggacatcctggaggacatcgtgctgaccctgaccctgttcgaggaccgggagatgatcgaggagcggctgaagacctacgcccacctgttcgacgacaaggtgatgaagcagctgaagcggcggcggtacaccggctggggccggctgtcccggaagctgatcaacggcatccgggacaagcagtccggcaagaccatcctggacttcctgaagtccgacggcttcgccaaccggaacttcatgcagctgatccacgacgactccctgaccttcaaggaggacatccagaaggcccaggtgtccggccagggcgactccctgcacgagcacatcgccaacctggccggctcccccgccatcaagaagggcatcctgcagaccgtgaaggtggtggacgagctggtgaaggtgatgggccggcacaagcccgagaacatcgtgatcgagatggcccgggagaaccagaccacccagaagggccagaagaactcccgggagcggatgaagcggatcgaggagggcatcaaggagctgggctcccagatcctgaaggagcaccccgtggagaacacccagctgcagaacgagaagctgtacctgtactacctgcagaacggccgggacatgtacgtggaccaggagctggacatcaaccggctgtccgactacgacgtggaccacatcgtgccccagtccttcctgaaggacgactccatcgacaacaaggtgctgacccggtccgacaagaaccggggcaagtccgacaacgtgccctccgaggaggtggtgaagaagatgaagaactactggcggcagctgctgaacgccaagctgatcacccagcggaagttcgacaacctgaccaaggccgagcggggcggcctgtccgagctggacaaggccggcttcatcaagcggcagctggtggagacccggcagatcaccaagcacgtggcccagatcctggactcccggatgaacaccaagtacgacgagaacgacaagctgatccgggaggtgaaggtgatcaccctgaagtccaagctggtgtccgacttccggaaggacttccagttctacaaggtgcgggagatcaacaactaccaccacgcccacgacgcctacctgaacgccgtggtgggcaccgccctgatcaagaagtaccccaagctggagtccgagttcgtgtacggcgactacaaggtgtacgacgtgcggaagatgatcgccaagtccgagcaggagatcggcaaggccaccgccaagtacttcttctactccaacatcatgaacttcttcaagaccgagatcaccctggccaacggcgagatccggaagcggcccctgatcgagaccaacggcgagaccggcgagatcgtgtgggacaagggccgggacttcgccaccgtgcggaaggtgctgtccatgccccaggtgaacatcgtgaagaagaccgaggtgcagaccggcggcttctccaaggagtccatcctgcccaagcggaactccgacaagctgatcgcccggaagaaggactgggaccccaagaagtacggcggcttcgactcccccaccgtggcctactccgtgctggtggtggccaaggtggagaagggcaagtccaagaagctgaagtccgtgaaggagctgctgggcatcaccatcatggagcggtcctccttcgagaagaaccccatcgacttcctggaggccaagggctacaaggaggtgaagaaggacctgatcatcaagctgcccaagtactccctgttcgagctggagaacggccggaagcggatgctggcctccgccggcgagctgcagaagggcaacgagctggccctgccctccaagtacgtgaacttcctgtacctggcctcccactacgagaagctgaagggctcccccgaggacaacgagcagaagcagctgttcgtggagcagcacaagcactacctggacgagatcatcgagcagatctccgagttctccaagcgggtgatcctggccgacgccaacctggacaaggtgctgtccgcctacaacaagcaccgggacaagcccatccgggagcaggccgagaacatcatccacctgttcaccctgaccaacctgggcgcccccgccgccttcaagtacttcgacaccaccatcgaccggaagcggtacacctccaccaaggaggtgctggacgccaccctgatccaccagtccatcaccggcctgtacgagacccggatcgacctgtcccagctgggcggcgacggcggcggctcccccaagaagaagcggaaggtgtga

SEQ ID NO: 812 - DNA, 4839 bp, synthetic construct
  misc_feature 1..4839: note = Synthetic
  source 1..4839: mol_type = other DNA
atggaggcctcccccgcctccggcccccggcacctgatggacccccacatcttcacctccaacttcaacaacggcatcggccggcacaagacctacctgtgctacgaggtggagcggctggacaacggcacctccgtgaagatggaccagcaccggggcttcctgcacaaccaggccaagaacctgctgtgcggcttctacggccggcacgccgagctgcggttcctggacctggtgccctccctgcagctggaccccgcccagatctaccgggtgacctggttcatctcctggtccccctgcttctcctggggctgcgccggcgaggtgcgggccttcctgcaggagaacacccacgtgcggctgcggatcttcgccgcccggatctacgactacgaccccctgtacaaggaggccctgcagatgctgcgggacgccggcgcccaggtgtccatcatgacctacgacgagttcaagcactgctgggacaccttcgtggaccaccagggctgccccttccagccctgggacggcctggacgagcactcccaggccctgtccggccggctgcgggccatcctgcagaaccagggcaactccggctccgagacccccggcacctccgagtccgccacccccgagtccgacaagaagtactccatcggcctggccatcggcaccaactccgtgggctgggccgtgatcaccgacgagtacaaggtgccctccaagaagttcaaggtgctgggcaacaccgaccggcactccatcaagaagaacctgatcggcgccctgctgttcgactccggcgagaccgccgaggccacccggctgaagcggaccgcccggcggcggtacacccggcggaagaaccggatctgctacctgcaggagatcttctccaacgagatggccaaggtggacgactccttcttccaccggctggaggagtccttcctggtggaggaggacaagaagcacgagcggcaccccatcttcggcaacatcgtggacgaggtggcctaccacgagaagtaccccaccatctaccacctgcggaagaagctggtggactccaccgacaaggccgacctgcggctgatctacctggccctggcccacatgatcaagttccggggccacttcctgatcgagggcgacctgaaccccgacaactccgacgtggacaagctgttcatccagctggtgcagacctacaaccagctgttcgaggagaaccccatcaacgcctccggcgtggacgccaaggccatcctgtccgcccggctgtccaagtcccggcggctggagaacctgatcgcccagctgcccggcgagaagaagaacggcctgttcggcaacctgatcgccctgtccctgggcctgacccccaacttcaagtccaacttcgacctggccgaggacgccaagctgcagctgtccaaggacacctacgacgacgacctggacaacctgctggcccagatcggcgaccagtacgccgacctgttcctggccgccaagaacctgtccgacgccatcctgctgtccgacatcctgcgggtgaacaccgagatcaccaaggcccccctgtccgcctccatgatcaagcggtacgacgagcaccaccaggacctgaccctgctgaaggccctggtgcggcagcagctgcccgagaagtacaaggagatcttcttcgaccagtccaagaacggctacgccggctacatcgacggcggcgcctcccaggaggagttctacaagttcatcaagcccatcctggagaagatggacggcaccgaggagctgctggtgaagctgaaccgggaggacctgctgcggaagcagcggaccttcgacaacggctccatcccccaccagatccacctgggcgagctgcacgccatcctgcggcggcaggaggacttctaccccttcctgaaggacaaccgggagaagatcgagaagatcctgaccttccggatcccctactacgtgggccccctggcccggggcaactcccggttcgcctggatgacccggaagtccgaggagaccatcaccccctggaacttcgaggaggtggtggacaagggcgcctccgcccagtccttcatcgagcggatgaccaacttcgacaagaacctgcccaacgagaaggtgctgcccaagcactccctgctgtacgagtacttcaccgtgtacaacgagctgaccaaggtgaagtacgtgaccgagggcatgcggaagcccgccttcctgtccggcgagcagaagaaggccatcgtggacctgctgttcaagaccaaccggaaggtgaccgtgaagcagctgaaggaggactacttcaagaagatcgagtgcttcgactccgtggagatctccggcgtggaggaccggttcaacgcctccctgggcacctaccacgacctgctgaagatcatcaaggacaaggacttcctggacaacgaggagaacgaggacatcctggaggacatcgtgctgaccctgaccctgttcgaggaccgggagatgatcgaggagcggctgaagacctacgcccacctgttcgacgacaaggtgatgaagcagctgaagcggcggcggtacaccggctggggccggctgtcccggaagctgatcaacggcatccgggacaagcagtccggcaagaccatcctggacttcctgaagtccgacggcttcgccaaccggaacttcatgcagctgatccacgacgactccctgaccttcaaggaggacatccagaaggcccaggtgtccggccagggcgactccctgcacgagcacatcgccaacctggccggctcccccgccatcaagaagggcatcctgcagaccgtgaaggtggtggacgagctggtgaaggtgatgggccggcacaagcccgagaacatcgtgatcgagatggcccgggagaaccagaccacccagaagggccagaagaactcccgggagcggatgaagcggatcgaggagggcatcaaggagctgggctcccagatcctgaaggagcaccccgtggagaacacccagctgcagaacgagaagctgtacctgtactacctgcagaacggccgggacatgtacgtggaccaggagctggacatcaaccggctgtccgactacgacgtggaccacatcgtgccccagtccttcctgaaggacgactccatcgacaacaaggtgctgacccggtccgacaagaaccggggcaagtccgacaacgtgccctccgaggaggtggtgaagaagatgaagaactactggcggcagctgctgaacgccaagctgatcacccagcggaagttcgacaacctgaccaaggccgagcggggcggcctgtccgagctggacaaggccggcttcatcaagcggcagctggtggagacccggcagatcaccaagcacgtggcccagatcctggactcccggatgaacaccaagtacgacgagaacgacaagctgatccgggaggtgaaggtgatcaccctgaagtccaagctggtgtccgacttccggaaggacttccagttctacaaggtgcgggagatcaacaactaccaccacgcccacgacgcctacctgaacgccgtggtgggcaccgccctgatcaagaagtaccccaagctggagtccgagttcgtgtacggcgactacaaggtgtacgacgtgcggaagatgatcgccaagtccgagcaggagatcggcaaggccaccgccaagtacttcttctactccaacatcatgaacttcttcaagaccgagatcaccctggccaacggcgagatccggaagcggcccctgatcgagaccaacggcgagaccggcgagatcgtgtgggacaagggccgggacttcgccaccgtgcggaaggtgctgtccatgccccaggtgaacatcgtgaagaagaccgaggtgcagaccggcggcttctccaaggagtccatcctgcccaagcggaactccgacaagctgatcgcccggaagaaggactgggaccccaagaagtacggcggcttcgactcccccaccgtggcctactccgtgctggtggtggccaaggtggagaagggcaagtccaagaagctgaagtccgtgaaggagctgctgggcatcaccatcatggagcggtcctccttcgagaagaaccccatcgacttcctggaggccaagggctacaaggaggtgaagaaggacctgatcatcaagctgcccaagtactccctgttcgagctggagaacggccggaagcggatgctggcctccgccggcgagctgcagaagggcaacgagctggccctgccctccaagtacgtgaacttcctgtacctggcctcccactacgagaagctgaagggctcccccgaggacaacgagcagaagcagctgttcgtggagcagcacaagcactacctggacgagatcatcgagcagatctccgagttctccaagcgggtgatcctggccgacgccaacctggacaaggtgctgtccgcctacaacaagcaccgggacaagcccatccgggagcaggccgagaacatcatccacctgttcaccctgaccaacctgggcgcccccgccgccttcaagtacttcgacaccaccatcgaccggaagcggtacacctccaccaaggaggtgctggacgccaccctgatccaccagtccatcaccggcctgtacgagacccggatcgacctgtcccagctgggcggcgacggcggcggctcccccaagaagaagcggaaggtgtccgagtccgccacccccgagtccgtgtccggctggcggctgttcaagaagatctcctga

SEQ ID NO: 813 - DNA, 4140 bp, synthetic construct
  misc_feature 1..4140: note = Synthetic
  source 1..4140: mol_type = other DNA
atggacaagaagtactccatcggcctggacatcggcaccaactccgtgggctgggccgtgatcaccgacgagtacaaggtgccctccaagaagttcaaggtgctgggcaacaccgaccggcactccatcaagaagaacctgatcggcgccctgctgttcgactccggcgagaccgccgaggccacccggctgaagcggaccgcccggcggcggtacacccggcggaagaaccggatctgctacctgcaggagatcttctccaacgagatggccaaggtggacgactccttcttccaccggctggaggagtccttcctggtggaggaggacaagaagcacgagcggcaccccatcttcggcaacatcgtggacgaggtggcctaccacgagaagtaccccaccatctaccacctgcggaagaagctggtggactccaccgacaaggccgacctgcggctgatctacctggccctggcccacatgatcaagttccggggccacttcctgatcgagggcgacctgaaccccgacaactccgacgtggacaagctgttcatccagctggtgcagacctacaaccagctgttcgaggagaaccccatcaacgcctccggcgtggacgccaaggccatcctgtccgcccggctgtccaagtcccggcggctggagaacctgatcgcccagctgcccggcgagaagaagaacggcctgttcggcaacctgatcgccctgtccctgggcctgacccccaacttcaagtccaacttcgacctggccgaggacgccaagctgcagctgtccaaggacacctacgacgacgacctggacaacctgctggcccagatcggcgaccagtacgccgacctgttcctggccgccaagaacctgtccgacgccatcctgctgtccgacatcctgcgggtgaacaccgagatcaccaaggcccccctgtccgcctccatgatcaagcggtacgacgagcaccaccaggacctgaccctgctgaaggccctggtgcggcagcagctgcccgagaagtacaaggagatcttcttcgaccagtccaagaacggctacgccggctacatcgacggcggcgcctcccaggaggagttctacaagttcatcaagcccatcctggagaagatggacggcaccgaggagctgctggtgaagctgaaccgggaggacctgctgcggaagcagcggaccttcgacaacggctccatcccccaccagatccacctgggcgagctgcacgccatcctgcggcggcaggaggacttctaccccttcctgaaggacaaccgggagaagatcgagaagatcctgaccttccggatcccctactacgtgggccccctggcccggggcaactcccggttcgcctggatgacccggaagtccgaggagaccatcaccccctggaacttcgaggaggtggtggacaagggcgcctccgcccagtccttcatcgagcggatgaccaacttcgacaagaacctgcccaacgagaaggtgctgcccaagcactccctgctgtacgagtacttcaccgtgtacaacgagctgaccaaggtgaagtacgtgaccgagggcatgcggaagcccgccttcctgtccggcgagcagaagaaggccatcgtggacctgctgttcaagaccaaccggaaggtgaccgtgaagcagctgaaggaggactacttcaagaagatcgagtgcttcgactccgtggagatctccggcgtggaggaccggttcaacgcctccctgggcacctaccacgacctgctgaagatcatcaaggacaaggacttcctggacaacgaggagaacgaggacatcctggaggacatcgtgctgaccctgaccctgttcgaggaccgggagatgatcgaggagcggctgaagacctacgcccacctgttcgacgacaaggtgatgaagcagctgaagcggcggcggtacaccggctggggccggctgtcccggaagctgatcaacggcatccgggacaagcagtccggcaagaccatcctggacttcctgaagtccgacggcttcgccaaccggaacttcatgcagctgatccacgacgactccctgaccttcaaggaggacatccagaaggcccaggtgtccggccagggcgactccctgcacgagcacatcgccaacctggccggctcccccgccatcaagaagggcatcctgcagaccgtgaaggtggtggacgagctggtgaaggtgatgggccggcacaagcccgagaacatcgtgatcgagatggcccgggagaaccagaccacccagaagggccagaagaactcccgggagcggatgaagcggatcgaggagggcatcaaggagctgggctcccagatcctgaaggagcaccccgtggagaacacccagctgcagaacgagaagctgtacctgtactacctgcagaacggccgggacatgtacgtggaccaggagctggacatcaaccggctgtccgactacgacgtggaccacatcgtgccccagtccttcctgaaggacgactccatcgacaacaaggtgctgacccggtccgacaagaaccggggcaagtccgacaacgtgccctccgaggaggtggtgaagaagatgaagaactactggcggcagctgctgaacgccaagctgatcacccagcggaagttcgacaacctgaccaaggccgagcggggcggcctgtccgagctggacaaggccggcttcatcaagcggcagctggtggagacccggcagatcaccaagcacgtggcccagatcctggactcccggatgaacaccaagtacgacgagaacgacaagctgatccgggaggtgaaggtgatcaccctgaagtccaagctggtgtccgacttccggaaggacttccagttctacaaggtgcgggagatcaacaactaccaccacgcccacgacgcctacctgaacgccgtggtgggcaccgccctgatcaagaagtaccccaagctggagtccgagttcgtgtacggcgactacaaggtgtacgacgtgcggaagatgatcgccaagtccgagcaggagatcggcaaggccaccgccaagtacttcttctactccaacatcatgaacttcttcaagaccgagatcaccctggccaacggcgagatccggaagcggcccctgatcgagaccaacggcgagaccggcgagatcgtgtgggacaagggccgggacttcgccaccgtgcggaaggtgctgtccatgccccaggtgaacatcgtgaagaagaccgaggtgcagaccggcggcttctccaaggagtccatcctgcccaagcggaactccgacaagctgatcgcccggaagaaggactgggaccccaagaagtacggcggcttcgactcccccaccgtggcctactccgtgctggtggtggccaaggtggagaagggcaagtccaagaagctgaagtccgtgaaggagctgctgggcatcaccatcatggagcggtcctccttcgagaagaaccccatcgacttcctggaggccaagggctacaaggaggtgaagaaggacctgatcatcaagctgcccaagtactccctgttcgagctggagaacggccggaagcggatgctggcctccgccggcgagctgcagaagggcaacgagctggccctgccctccaagtacgtgaacttcctgtacctggcctcccactacgagaagctgaagggctcccccgaggacaacgagcagaagcagctgttcgtggagcagcacaagcactacctggacgagatcatcgagcagatctccgagttctccaagcgggtgatcctggccgacgccaacctggacaaggtgctgtccgcctacaacaagcaccgggacaagcccatccgggagcaggccgagaacatcatccacctgttcaccctgaccaacctgggcgcccccgccgccttcaagtacttcgacaccaccatcgaccggaagcggtacacctccaccaaggaggtgctggacgccaccctgatccaccagtccatcaccggcctgtacgagacccggatcgacctgtcccagctgggcggcgacggcggcggctcccccaagaagaagcggaaggtgtga

SEQ ID NO: 814 - DNA, 4197 bp, synthetic construct
  misc_feature 1..4197: note = Synthetic
  source 1..4197: mol_type = other DNA
atggacaagaagtactccatcggcctggacatcggcaccaactccgtgggctgggccgtgatcaccgacgagtacaaggtgccctccaagaagttcaaggtgctgggcaacaccgaccggcactccatcaagaagaacctgatcggcgccctgctgttcgactccggcgagaccgccgaggccacccggctgaagcggaccgcccggcggcggtacacccggcggaagaaccggatctgctacctgcaggagatcttctccaacgagatggccaaggtggacgactccttcttccaccggctggaggagtccttcctggtggaggaggacaagaagcacgagcggcaccccatcttcggcaacatcgtggacgaggtggcctaccacgagaagtaccccaccatctaccacctgcggaagaagctggtggactccaccgacaaggccgacctgcggctgatctacctggccctggcccacatgatcaagttccggggccacttcctgatcgagggcgacctgaaccccgacaactccgacgtggacaagctgttcatccagctggtgcagacctacaaccagctgttcgaggagaaccccatcaacgcctccggcgtggacgccaaggccatcctgtccgcccggctgtccaagtcccggcggctggagaacctgatcgcccagctgcccggcgagaagaagaacggcctgttcggcaacctgatcgccctgtccctgggcctgacccccaacttcaagtccaacttcgacctggccgaggacgccaagctgcagctgtccaaggacacctacgacgacgacctggacaacctgctggcccagatcggcgaccagtacgccgacctgttcctggccgccaagaacctgtccgacgccatcctgctgtccgacatcctgcgggtgaacaccgagatcaccaaggcccccctgtccgcctccatgatcaagcggtacgacgagcaccaccaggacctgaccctgctgaaggccctggtgcggcagcagctgcccgagaagtacaaggagatcttcttcgaccagtccaagaacggctacgccggctacatcgacggcggcgcctcccaggaggagttctacaagttcatcaagcccatcctggagaagatggacggcaccgaggagctgctggtgaagctgaaccgggaggacctgctgcggaagcagcggaccttcgacaacggctccatcccccaccagatccacctgggcgagctgcacgccatcctgcggcggcaggaggacttctaccccttcctgaaggacaaccgggagaagatcgagaagatcctgaccttccggatcccctactacgtgggccccctggcccggggcaactcccggttcgcctggatgacccggaagtccgaggagaccatcaccccctggaacttcgaggaggtggtggacaagggcgcctccgcccagtccttcatcgagcggatgaccaacttcgacaagaacctgcccaacgagaaggtgctgcccaagcactccctgctgtacgagtacttcaccgtgtacaacgagctgaccaaggtgaagtacgtgaccgagggcatgcggaagcccgccttcctgtccggcgagcagaagaaggccatcgtggacctgctgttcaagaccaaccggaaggtgaccgtgaagcagctgaaggaggactacttcaagaagatcgagtgcttcgactccgtggagatctccggcgtggaggaccggttcaacgcctccctgggcacctaccacgacctgctgaagatcatcaaggacaaggacttcctggacaacgaggagaacgaggacatcctggaggacatcgtgctgaccctgaccctgttcgaggaccgggagatgatcgaggagcggctgaagacctacgcccacctgttcgacgacaaggtgatgaagcagctgaagcggcggcggtacaccggctggggccggctgtcccggaagctgatcaacggcatccgggacaagcagtccggcaagaccatcctggacttcctgaagtccgacggcttcgccaaccggaacttcatgcagctgatccacgacgactccctgaccttcaaggaggacatccagaaggcccaggtgtccggccagggcgactccctgcacgagcacatcgccaacctggccggctcccccgccatcaagaagggcatcctgcagaccgtgaaggtggtggacgagctggtgaaggtgatgggccggcacaagcccgagaacatcgtgatcgagatggcccgggagaaccagaccacccagaagggccagaagaactcccgggagcggatgaagcggatcgaggagggcatcaaggagctgggctcccagatcctgaaggagcaccccgtggagaacacccagctgcagaacgagaagctgtacctgtactacctgcagaacggccgggacatgtacgtggaccaggagctggacatcaaccggctgtccgactacgacgtggaccacatcgtgccccagtccttcctgaaggacgactccatcgacaacaaggtgctgacccggtccgacaagaaccggggcaagtccgacaacgtgccctccgaggaggtggtgaagaagatgaagaactactggcggcagctgctgaacgccaagctgatcacccagcggaagttcgacaacctgaccaaggccgagcggggcggcctgtccgagctggacaaggccggcttcatcaagcggcagctggtggagacccggcagatcaccaagcacgtggcccagatcctggactcccggatgaacaccaagtacgacgagaacgacaagctgatccgggaggtgaaggtgatcaccctgaagtccaagctggtgtccgacttccggaaggacttccagttctacaaggtgcgggagatcaacaactaccaccacgcccacgacgcctacctgaacgccgtggtgggcaccgccctgatcaagaagtaccccaagctggagtccgagttcgtgtacggcgactacaaggtgtacgacgtgcggaagatgatcgccaagtccgagcaggagatcggcaaggccaccgccaagtacttcttctactccaacatcatgaacttcttcaagaccgagatcaccctggccaacggcgagatccggaagcggcccctgatcgagaccaacggcgagaccggcgagatcgtgtgggacaagggccgggacttcgccaccgtgcggaaggtgctgtccatgccccaggtgaacatcgtgaagaagaccgaggtgcagaccggcggcttctccaaggagtccatcctgcccaagcggaactccgacaagctgatcgcccggaagaaggactgggaccccaagaagtacggcggcttcgactcccccaccgtggcctactccgtgctggtggtggccaaggtggagaagggcaagtccaagaagctgaagtccgtgaaggagctgctgggcatcaccatcatggagcggtcctccttcgagaagaaccccatcgacttcctggaggccaagggctacaaggaggtgaagaaggacctgatcatcaagctgcccaagtactccctgttcgagctggagaacggccggaagcggatgctggcctccgccggcgagctgcagaagggcaacgagctggccctgccctccaagtacgtgaacttcctgtacctggcctcccactacgagaagctgaagggctcccccgaggacaacgagcagaagcagctgttcgtggagcagcacaagcactacctggacgagatcatcgagcagatctccgagttctccaagcgggtgatcctggccgacgccaacctggacaaggtgctgtccgcctacaacaagcaccgggacaagcccatccgggagcaggccgagaacatcatccacctgttcaccctgaccaacctgggcgcccccgccgccttcaagtacttcgacaccaccatcgaccggaagcggtacacctccaccaaggaggtgctggacgccaccctgatccaccagtccatcaccggcctgtacgagacccggatcgacctgtcccagctgggcggcgacggcggcggctcccccaagaagaagcggaaggtgtccgagtccgccacccccgagtccgtgtccggctggcggctgttcaagaagatctcctga

SEQ ID NO: 815 - DNA, 5427 bp, synthetic construct
  misc_feature 1..5427: note = Synthetic
  source 1..5427: mol_type = other DNA
atggaggcctcccccgcctccggcccccggcacctgatggacccccacatcttcacctccaacttcaacaacggcatcggccggcacaagacctacctgtgctacgaggtggagcggctggacaacggcacctccgtgaagatggaccagcaccggggcttcctgcacaaccaggccaagaacctgctgtgcggcttctacggccggcacgccgagctgcggttcctggacctggtgccctccctgcagctggaccccgcccagatctaccgggtgacctggttcatctcctggtccccctgcttctcctggggctgcgccggcgaggtgcgggccttcctgcaggagaacacccacgtgcggctgcggatcttcgccgcccggatctacgactacgaccccctgtacaaggaggccctgcagatgctgcgggacgccggcgcccaggtgtccatcatgacctacgacgagttcaagcactgctgggacaccttcgtggaccaccagggctgccccttccagccctgggacggcctggacgagcactcccaggccctgtccggccggctgcgggccatcctgcagaaccagggcaactccggctccgagacccccggcacctccgagtccgccacccccgagtccgacaagaagtactccatcggcctggccatcggcaccaactccgtgggctgggccgtgatcaccgacgagtacaaggtgccctccaagaagttcaaggtgctgggcaacaccgaccggcactccatcaagaagaacctgatcggcgccctgctgttcgactccggcgagaccgccgaggccacccggctgaagcggaccgcccggcggcggtacacccggcggaagaaccggatctgctacctgcaggagatcttctccaacgagatggccaaggtggacgactccttcttccaccggctggaggagtccttcctggtggaggaggacaagaagcacgagcggcaccccatcttcggcaacatcgtggacgaggtggcctaccacgagaagtaccccaccatctaccacctgcggaagaagctggtggactccaccgacaaggccgacctgcggctgatctacctggccctggcccacatgatcaagttccggggccacttcctgatcgagggcgacctgaaccccgacaactccgacgtggacaagctgttcatccagctggtgcagacctacaaccagctgttcgaggagaaccccatcaacgcctccggcgtggacgccaaggccatcctgtccgcccggctgtccaagtcccggcggctggagaacctgatcgcccagctgcccggcgagaagaagaacggcctgttcggcaacctgatcgccctgtccctgggcctgacccccaacttcaagtccaacttcgacctggccgaggacgccaagctgcagctgtccaaggacacctacgacgacgacctggacaacctgctggcccagatcggcgaccagtacgccgacctgttcctggccgccaagaacctgtccgacgccatcctgctgtccgacatcctgcgggtgaacaccgagatcaccaaggcccccctgtccgcctccatgatcaagcggtacgacgagcaccaccaggacctgaccctgctgaaggccctggtgcggcagcagctgcccgagaagtacaaggagatcttcttcgaccagtccaagaacggctacgccggctacatcgacggcggcgcctcccaggaggagttctacaagttcatcaagcccatcctggagaagatggacggcaccgaggagctgctggtgaagctgaaccgggaggacctgctgcggaagcagcggaccttcgacaacggctccatcccccaccagatccacctgggcgagctgcacgccatcctgcggcggcaggaggacttctaccccttcctgaaggacaaccgggagaagatcgagaagatcctgaccttccggatcccctactacgtgggccccctggcccggggcaactcccggttcgcctggatgacccggaagtccgaggagaccatcaccccctggaacttcgaggaggtggtggacaagggcgcctccgcccagtccttcatcgagcggatgaccaacttcgacaagaacctgcccaacgagaaggtgctgcccaagcactccctgctgtacgagtacttcaccgtgtacaacgagctgaccaaggtgaagtacgtgaccgagggcatgcggaagcccgccttcctgtccggcgagcagaagaaggccatcgtggacctgctgttcaagaccaaccggaaggtgaccgtgaagcagctgaaggaggactacttcaagaagatcgagtgcttcgactccgtggagatctccggcgtggaggaccggttcaacgcctccctgggcacctaccacgacctgctgaagatcatcaaggacaaggacttcctggacaacgaggagaacgaggacatcctggaggacatcgtgctgaccctgaccctgttcgaggaccgggagatgatcgaggagcggctgaagacctacgcccacctgttcgacgacaaggtgatgaagcagctgaagcggcggcggtacaccggctggggccggctgtcccggaagctgatcaacggcatccgggacaagcagtccggcaagaccatcctggacttcctgaagtccgacggcttcgccaaccggaacttcatgcagctgatccacgacgactccctgaccttcaaggaggacatccagaaggcccaggtgtccggccagggcgactccctgcacgagcacatcgccaacctggccggctcccccgccatcaagaagggcatcctgcagaccgtgaaggtggtggacgagctggtgaaggtgatgggccggcacaagcccgagaacatcgtgatcgagatggcccgggagaaccagaccacccagaagggccagaagaactcccgggagcggatgaagcggatcgaggagggcatcaaggagctgggctcccagatcctgaaggagcaccccgtggagaacacccagctgcagaacgagaagctgtacctgtactacctgcagaacggccgggacatgtacgtggaccaggagctggacatcaaccggctgtccgactacgacgtggaccacatcgtgccccagtccttcctgaaggacgactccatcgacaacaaggtgctgacccggtccgacaagaaccggggcaagtccgacaacgtgccctccgaggaggtggtgaagaagatgaagaactactggcggcagctgctgaacgccaagctgatcacccagcggaagttcgacaacctgaccaaggccgagcggggcggcctgtccgagctggacaaggccggcttcatcaagcggcagctggtggagacccggcagatcaccaagcacgtggcccagatcctggactcccggatgaacaccaagtacgacgagaacgacaagctgatccgggaggtgaaggtgatcaccctgaagtccaagctggtgtccgacttccggaaggacttccagttctacaaggtgcgggagatcaacaactaccaccacgcccacgacgcctacctgaacgccgtggtgggcaccgccctgatcaagaagtaccccaagctggagtccgagttcgtgtacggcgactacaaggtgtacgacgtgcggaagatgatcgccaagtccgagcaggagatcggcaaggccaccgccaagtacttcttctactccaacatcatgaacttcttcaagaccgagatcaccctggccaacggcgagatccggaagcggcccctgatcgagaccaacggcgagaccggcgagatcgtgtgggacaagggccgggacttcgccaccgtgcggaaggtgctgtccatgccccaggtgaacatcgtgaagaagaccgaggtgcagaccggcggcttctccaaggagtccatcctgcccaagcggaactccgacaagctgatcgcccggaagaaggactgggaccccaagaagtacggcggcttcgactcccccaccgtggcctactccgtgctggtggtggccaaggtggagaagggcaagtccaagaagctgaagtccgtgaaggagctgctgggcatcaccatcatggagcggtcctccttcgagaagaaccccatcgacttcctggaggccaagggctacaaggaggtgaagaaggacctgatcatcaagctgcccaagtactccctgttcgagctggagaacggccggaagcggatgctggcctccgccggcgagctgcagaagggcaacgagctggccctgccctccaagtacgtgaacttcctgtacctggcctcccactacgagaagctgaagggctcccccgaggacaacgagcagaagcagctgttcgtggagcagcacaagcactacctggacgagatcatcgagcagatctccgagttctccaagcgggtgatcctggccgacgccaacctggacaaggtgctgtccgcctacaacaagcaccgggacaagcccatccgggagcaggccgagaacatcatccacctgttcaccctgaccaacctgggcgcccccgccgccttcaagtacttcgacaccaccatcgaccggaagcggtacacctccaccaaggaggtgctggacgccaccctgatccaccagtccatcaccggcctgtacgagacccggatcgacctgtcccagctgggcggcgactccggcggctccggcggctccggcggctccaccaacctgtccgacatcatcgagaaggagaccggcaagcagctggtgatccaggagtccatcctgatgctgcccgaggaggtggaggaggtgatcggcaacaagcccgagtccgacatcctggtgcacaccgcctacgacgagtccaccgacgagaacgtgatgctgctgacctccgacgcccccgagtacaagccctgggccctggtgatccaggactccaacggcgagaacaagatcaagatgctgtccggcggctccggcggctccggcggctccaccaacctgtccgacatcatcgagaaggagaccggcaagcagctggtgatccaggagtccatcctgatgctgcccgaggaggtggaggaggtgatcggcaacaagcccgagtccgacatcctggtgcacaccgcctacgacgagtccaccgacgagaacgtgatgctgctgacctccgacgcccccgagtacaagccctgggccctggtgatccaggactccaacggcgagaacaagatcaagatgctgtccggcggctccaagcggaccgccgacggctccgagttcgagcccaagaagaagcggaaggtgtccgagtccgccacccccgagtccgtgtccggctggcggctgttcaagaagatctcctga

SEQ ID NO: 816 - DNA, 4140 bp, synthetic construct
  misc_feature 1..4140: note = Synthetic
  source 1..4140: mol_type = other DNA
atggacaagaagtacagcatcggactggacatcggaacaaacagcgtcggatgggcagtcatcacagacgaatacaaggtcccgagcaagaagttcaaggtcctgggaaacacagacagacacagcatcaagaagaacctgatcggagcactgctgttcgacagcggagaaacagcagaagcaacaagactgaagagaacagcaagaagaagatacacaagaagaaagaacagaatctgctacctgcaggaaatcttcagcaacgaaatggcaaaggtcgacgacagcttcttccacagactggaagaaagcttcctggtcgaagaagacaagaagcacgaaagacacccgatcttcggaaacatcgtcgacgaagtcgcataccacgaaaagtacccgacaatctaccacctgagaaagaagctggtcgacagcacagacaaggcagacctgagactgatctacctggcactggcacacatgatcaagttcagaggacacttcctgatcgaaggagacctgaacccggacaacagcgacgtcgacaagctgttcatccagctggtccagacatacaaccagctgttcgaagaaaacccgatcaacgcaagcggagtcgacgcaaaggcaatcctgagcgcaagactgagcaagagcagaagactggaaaacctgatcgcacagctgccgggagaaaagaagaacggactgttcggaaacctgatcgcactgagcctgggactgacaccgaacttcaagagcaacttcgacctggcagaagacgcaaagctgcagctgagcaaggacacatacgacgacgacctggacaacctgctggcacagatcggagaccagtacgcagacctgttcctggcagcaaagaacctgagcgacgcaatcctgctgagcgacatcctgagagtcaacacagaaatcacaaaggcaccgctgagcgcaagcatgatcaagagatacgacgaacaccaccaggacctgacactgctgaaggcactggtcagacagcagctgccggaaaagtacaaggaaatcttcttcgaccagagcaagaacggatacgcaggatacatcgacggaggagcaagccaggaagaattctacaagttcatcaagccgatcctggaaaagatggacggaacagaagaactgctggtcaagctgaacagagaagacctgctgagaaagcagagaacattcgacaacggaagcatcccgcaccagatccacctgggagaactgcacgcaatcctgagaagacaggaagacttctacccgttcctgaaggacaacagagaaaagatcgaaaagatcctgacattcagaatcccgtactacgtcggaccgctggcaagaggaaacagcagattcgcatggatgacaagaaagagcgaagaaacaatcacaccgtggaacttcgaagaagtcgtcgacaagggagcaagcgcacagagcttcatcgaaagaatgacaaacttcgacaagaacctgccgaacgaaaaggtcctgccgaagcacagcctgctgtacgaatacttcacagtctacaacgaactgacaaaggtcaagtacgtcacagaaggaatgagaaagccggcattcctgagcggagaacagaagaaggcaatcgtcgacctgctgttcaagacaaacagaaaggtcacagtcaagcagctgaaggaagactacttcaagaagatcgaatgcttcgacagcgtcgaaatcagcggagtcgaagacagattcaacgcaagcctgggaacataccacgacctgctgaagatcatcaaggacaaggacttcctggacaacgaagaaaacgaagacatcctggaagacatcgtcctgacactgacactgttcgaagacagagaaatgatcgaagaaagactgaagacatacgcacacctgttcgacgacaaggtcatgaagcagctgaagagaagaagatacacaggatggggaagactgagcagaaagctgatcaacggaatcagagacaagcagagcggaaagacaatcctggacttcctgaagagcgacggattcgcaaacagaaacttcatgcagctgatccacgacgacagcctgacattcaaggaagacatccagaaggcacaggtcagcggacagggagacagcctgcacgaacacatcgcaaacctggcaggaagcccggcaatcaagaagggaatcctgcagacagtcaaggtcgtcgacgaactggtcaaggtcatgggaagacacaagccggaaaacatcgtcatcgaaatggcaagagaaaaccagacaacacagaagggacagaagaacagcagagaaagaatgaagagaatcgaagaaggaatcaaggaactgggaagccagatcctgaaggaacacccggtcgaaaacacacagctgcagaacgaaaagctgtacctgtactacctgcagaacggaagagacatgtacgtcgaccaggaactggacatcaacagactgagcgactacgacgtcgaccacatcgtcccgcagagcttcctgaaggacgacagcatcgacaacaaggtcctgacaagaagcgacaagaacagaggaaagagcgacaacgtcccgagcgaagaagtcgtcaagaagatgaagaactactggagacagctgctgaacgcaaagctgatcacacagagaaagttcgacaacctgacaaaggcagagagaggaggactgagcgaactggacaaggcaggattcatcaagagacagctggtcgaaacaagacagatcacaaagcacgtcgcacagatcctggacagcagaatgaacacaaagtacgacgaaaacgacaagctgatcagagaagtcaaggtcatcacactgaagagcaagctggtcagcgacttcagaaaggacttccagttctacaaggtcagagaaatcaacaactaccaccacgcacacgacgcatacctgaacgcagtcgtcggaacagcactgatcaagaagtacccgaagctggaaagcgaattcgtctacggagactacaaggtctacgacgtcagaaagatgatcgcaaagagcgaacaggaaatcggaaaggcaacagcaaagtacttcttctacagcaacatcatgaacttcttcaagacagaaatcacactggcaaacggagaaatcagaaagagaccgctgatcgaaacaaacggagaaacaggagaaatcgtctgggacaagggaagagacttcgcaacagtcagaaaggtcctgagcatgccgcaggtcaacatcgtcaagaagacagaagtccagacaggaggattcagcaaggaaagcatcctgccgaagagaaacagcgacaagctgatcgcaagaaagaaggactgggacccgaagaagtacggaggattcgacagcccgacagtcgcatacagcgtcctggtcgtcgcaaaggtcgaaaagggaaagagcaagaagctgaagagcgtcaaggaactgctgggaatcacaatcatggaaagaagcagcttcgaaaagaacccgatcgacttcctggaagcaaagggatacaaggaagtcaagaaggacctgatcatcaagctgccgaagtacagcctgttcgaactggaaaacggaagaaagagaatgctggcaagcgcaggagaactgcagaagggaaacgaactggcactgccgagcaagtacgtcaacttcctgtacctggcaagccactacgaaaagctgaagggaagcccggaagacaacgaacagaagcagctgttcgtcgaacagcacaagcactacctggacgaaatcatcgaacagatcagcgaattcagcaagagagtcatcctggcagacgcaaacctggacaaggtcctgagcgcatacaacaagcacagagacaagccgatcagagaacaggcagaaaacatcatccacctgttcacactgacaaacctgggagcaccggcagcattcaagtacttcgacacaacaatcgacagaaagagatacacaagcacaaaggaagtcctggacgcaacactgatccaccagagcatcacaggactgtacgaaacaagaatcgacctgagccagctgggaggagacggaggaggaagcccgaagaagaagagaaaggtctag

SEQ ID NO: 817 - DNA, 4140 bp, synthetic construct
  misc_feature 1..4140: note = Synthetic
  source 1..4140: mol_type = other DNA
atggacaagaagtacagcatcggcctcgacatcggcaccaacagcgtcggctgggccgtcatcaccgacgagtacaaggtccccagcaagaagttcaaggtcctcggcaacaccgaccgccacagcatcaagaagaacctcatcggcgccctcctcttcgacagcggcgagaccgccgaggccacccgcctcaagcgcaccgcccgccgccgctacacccgccgcaagaaccgcatctgctacctccaggagatcttcagcaacgagatggccaaggtcgacgacagcttcttccaccgcctcgaggagagcttcctcgtcgaggaggacaagaagcacgagcgccaccccatcttcggcaacatcgtcgacgaggtcgcctaccacgagaagtaccccaccatctaccacctccgcaagaagctcgtcgacagcaccgacaaggccgacctccgcctcatctacctcgccctcgcccacatgatcaagttccgcggccacttcctcatcgagggcgacctcaaccccgacaacagcgacgtcgacaagctcttcatccagctcgtccagacctacaaccagctcttcgaggagaaccccatcaacgccagcggcgtcgacgccaaggccatcctcagcgcccgcctcagcaagagccgccgcctcgagaacctcatcgcccagctccccggcgagaagaagaacggcctcttcggcaacctcatcgccctcagcctcggcctcacccccaacttcaagagcaacttcgacctcgccgaggacgccaagctccagctcagcaaggacacctacgacgacgacctcgacaacctcctcgcccagatcggcgaccagtacgccgacctcttcctcgccgccaagaacctcagcgacgccatcctcctcagcgacatcctccgcgtcaacaccgagatcaccaaggcccccctcagcgccagcatgatcaagcgctacgacgagcaccaccaggacctcaccctcctcaaggccctcgtccgccagcagctccccgagaagtacaaggagatcttcttcgaccagagcaagaacggctacgccggctacatcgacggcggcgccagccaggaggagttctacaagttcatcaagcccatcctcgagaagatggacggcaccgaggagctcctcgtcaagctcaaccgcgaggacctcctccgcaagcagcgcaccttcgacaacggcagcatcccccaccagatccacctcggcgagctccacgccatcctccgccgccaggaggacttctaccccttcctcaaggacaaccgcgagaagatcgagaagatcctcaccttccgcatcccctactacgtcggccccctcgcccgcggcaacagccgcttcgcctggatgacccgcaagagcgaggagaccatcaccccctggaacttcgaggaggtcgtcgacaagggcgccagcgcccagagcttcatcgagcgcatgaccaacttcgacaagaacctccccaacgagaaggtcctccccaagcacagcctcctctacgagtacttcaccgtctacaacgagctcaccaaggtcaagtacgtcaccgagggcatgcgcaagcccgccttcctcagcggcgagcagaagaaggccatcgtcgacctcctcttcaagaccaaccgcaaggtcaccgtcaagcagctcaaggaggactacttcaagaagatcgagtgcttcgacagcgtcgagatcagcggcgtcgaggaccgcttcaacgccagcctcggcacctaccacgacctcctcaagatcatcaaggacaaggacttcctcgacaacgaggagaacgaggacatcctcgaggacatcgtcctcaccctcaccctcttcgaggaccgcgagatgatcgaggagcgcctcaagacctacgcccacctcttcgacgacaaggtcatgaagcagctcaagcgccgccgctacaccggctggggccgcctcagccgcaagctcatcaacggcatccgcgacaagcagagcggcaagaccatcctcgacttcctcaagagcgacggcttcgccaaccgcaacttcatgcagctcatccacgacgacagcctcaccttcaaggaggacatccagaaggcccaggtcagcggccagggcgacagcctccacgagcacatcgccaacctcgccggcagccccgccatcaagaagggcatcctccagaccgtcaaggtcgtcgacgagctcgtcaaggtcatgggccgccacaagcccgagaacatcgtcatcgagatggcccgcgagaaccagaccacccagaagggccagaagaacagccgcgagcgcatgaagcgcatcgaggagggcatcaaggagctcggcagccagatcctcaaggagcaccccgtcgagaacacccagctccagaacgagaagctctacctctactacctccagaacggccgcgacatgtacgtcgaccaggagctcgacatcaaccgcctcagcgactacgacgtcgaccacatcgtcccccagagcttcctcaaggacgacagcatcgacaacaaggtcctcacccgcagcgacaagaaccgcggcaagagcgacaacgtccccagcgaggaggtcgtcaagaagatgaagaactactggcgccagctcctcaacgccaagctcatcacccagcgcaagttcgacaacctcaccaaggccgagcgcggcggcctcagcgagctcgacaaggccggcttcatcaagcgccagctcgtcgagacccgccagatcaccaagcacgtcgcccagatcctcgacagccgcatgaacaccaagtacgacgagaacgacaagctcatccgcgaggtcaaggtcatcaccctcaagagcaagctcgtcagcgacttccgcaaggacttccagttctacaaggtccgcgagatcaacaactaccaccacgcccacgacgcctacctcaacgccgtcgtcggcaccgccctcatcaagaagtaccccaagctcgagagcgagttcgtctacggcgactacaaggtctacgacgtccgcaagatgatcgccaagagcgagcaggagatcggcaaggccaccgccaagtacttcttctacagcaacatcatgaacttcttcaagaccgagatcaccctcgccaacggcgagatccgcaagcgccccctcatcgagaccaacggcgagaccggcgagatcgtctgggacaagggccgcgacttcgccaccgtccgcaaggtcctcagcatgccccaggtcaacatcgtcaagaagaccgaggtccagaccggcggcttcagcaaggagagcatcctccccaagcgcaacagcgacaagctcatcgcccgcaagaaggactgggaccccaagaagtacggcggcttcgacagccccaccgtcgcctacagcgtcctcgtcgtcgccaaggtcgagaagggcaagagcaagaagctcaagagcgtcaaggagctcctcggcatcaccatcatggagcgcagcagcttcgagaagaaccccatcgacttcctcgaggccaagggctacaaggaggtcaagaaggacctcatcatcaagctccccaagtacagcctcttcgagctcgagaacggccgcaagcgcatgctcgccagcgccggcgagctccagaagggcaacgagctcgccctccccagcaagtacgtcaacttcctctacctcgccagccactacgagaagctcaagggcagccccgaggacaacgagcagaagcagctcttcgtcgagcagcacaagcactacctcgacgagatcatcgagcagatcagcgagttcagcaagcgcgtcatcctcgccgacgccaacctcgacaaggtcctcagcgcctacaacaagcaccgcgacaagcccatccgcgagcaggccgagaacatcatccacctcttcaccctcaccaacctcggcgcccccgccgccttcaagtacttcgacaccaccatcgaccgcaagcgctacaccagcaccaaggaggtcctcgacgccaccctcatccaccagagcatcaccggcctctacgagacccgcatcgacctcagccagctcggcggcgacggcggcggcagccccaagaagaagcgcaaggtctag

SEQ ID NO: 818 - DNA, 4140 bp, synthetic construct
  misc_feature 1..4140: note = Synthetic
  source 1..4140: mol_type = other DNA
atggacaagaagtacagcatcggcctggacatcggcaccaacagcgtgggctgggccgtgatcaccgacgagtacaaggtgcccagcaagaagttcaaggtgctgggcaacaccgaccggcacagcatcaagaagaacctgatcggcgccctgctgttcgacagcggcgagaccgccgaggccacccggctgaagcggaccgcccggcggcggtacacccggcggaagaaccggatctgctacctgcaggagatcttcagcaacgagatggccaaggtggacgacagcttcttccaccggctggaggagagcttcctggtggaggaggacaagaagcacgagcggcaccccatcttcggcaacatcgtggacgaggtggcctaccacgagaagtaccccaccatctaccacctgcggaagaagctggtggacagcaccgacaaggccgacctgcggctgatctacctggccctggcccacatgatcaagttccggggccacttcctgatcgagggcgacctgaaccccgacaacagcgacgtggacaagctgttcatccagctggtgcagacctacaaccagctgttcgaggagaaccccatcaacgccagcggcgtggacgccaaggccatcctgagcgcccggctgagcaagagccggcggctggagaacctgatcgcccagctgcccggcgagaagaagaacggcctgttcggcaacctgatcgccctgagcctgggcctgacccccaacttcaagagcaacttcgacctggccgaggacgccaagctgcagctgagcaaggacacctacgacgacgacctggacaacctgctggcccagatcggcgaccagtacgccgacctgttcctggccgccaagaacctgagcgacgccatcctgctgagcgacatcctgcgggtgaacaccgagatcaccaaggcccccctgagcgccagcatgatcaagcggtacgacgagcaccaccaggacctgaccctgctgaaggccctggtgcggcagcagctgcccgagaagtacaaggagatcttcttcgaccagagcaagaacggctacgccggctacatcgacggcggcgccagccaggaggagttctacaagttcatcaagcccatcctggagaagatggacggcaccgaggagctgctggtgaagctgaaccgggaggacctgctgcggaagcagcggaccttcgacaacggcagcatcccccaccagatccacctgggcgagctgcacgccatcctgcggcggcaggaggacttctaccccttcctgaaggacaaccgggagaagatcgagaagatcctgaccttccggatcccctactacgtgggccccctggcccggggcaacagccggttcgcctggatgacccggaagagcgaggagaccatcaccccctggaacttcgaggaggtggtggacaagggcgccagcgcccagagcttcatcgagcggatgaccaacttcgacaagaacctgcccaacgagaaggtgctgcccaagcacagcctgctgtacgagtacttcaccgtgtacaacgagctgaccaaggtgaagtacgtgaccgagggcatgcggaagcccgccttcctgagcggcgagcagaagaaggccatcgtggacctgctgttcaagaccaaccggaaggtgaccgtgaagcagctgaaggaggactacttcaagaagatcgagtgcttcgacagcgtggagatcagcggcgtggaggaccggttcaacgccagcctgggcacctaccacgacctgctgaagatcatcaaggacaaggacttcctggacaacgaggagaacgaggacatcctggaggacatcgtgctgaccctgaccctgttcgaggaccgggagatgatcgaggagcggctgaagacctacgcccacctgttcgacgacaaggtgatgaagcagctgaagcggcggcggtacaccggctggggccggctgagccggaagctgatcaacggcatccgggacaagcagagcggcaagaccatcctggacttcctgaagagcgacggcttcgccaaccggaacttcatgcagctgatccacgacgacagcctgaccttcaaggaggacatccagaaggcccaggtgagcggccagggcgacagcctgcacgagcacatcgccaacctggccggcagccccgccatcaagaagggcatcctgcagaccgtgaaggtggtggacgagctggtgaaggtgatgggccggcacaagcccgagaacatcgtgatcgagatggcccgggagaaccagaccacccagaagggccagaagaacagccgggagcggatgaagcggatcgaggagggcatcaaggagctgggcagccagatcctgaaggagcaccccgtggagaacacccagctgcagaacgagaagctgtacctgtactacctgcagaacggccgggacatgtacgtggaccaggagctggacatcaaccggctgagcgactacgacgtggaccacatcgtgccccagagcttcctgaaggacgacagcatcgacaacaaggtgctgacccggagcgacaagaaccggggcaagagcgacaacgtgcccagcgaggaggtggtgaagaagatgaagaactactggcggcagctgctgaacgccaagctgatcacccagcggaagttcgacaacctgaccaaggccgagcggggcggcctgagcgagctggacaaggccggcttcatcaagcggcagctggtggagacccggcagatcaccaagcacgtggcccagatcctggacagccggatgaacaccaagtacgacgagaacgacaagctgatccgggaggtgaaggtgatcaccctgaagagcaagctggtgagcgacttccggaaggacttccagttctacaaggtgcgggagatcaacaactaccaccacgcccacgacgcctacctgaacgccgtggtgggcaccgccctgatcaagaagtaccccaagctggagagcgagttcgtgtacggcgactacaaggtgtacgacgtgcggaagatgatcgccaagagcgagcaggagatcggcaaggccaccgccaagtacttcttctacagcaacatcatgaacttcttcaagaccgagatcaccctggccaacggcgagatccggaagcggcccctgatcgagaccaacggcgagaccggcgagatcgtgtgggacaagggccgggacttcgccaccgtgcggaaggtgctgagcatgccccaggtgaacatcgtgaagaagaccgaggtgcagaccggcggcttcagcaaggagagcatcctgcccaagcggaacagcgacaagctgatcgcccggaagaaggactgggaccccaagaagtacggcggcttcgacagccccaccgtggcctacagcgtgctggtggtggccaaggtggagaagggcaagagcaagaagctgaagagcgtgaaggagctgctgggcatcaccatcatggagcggagcagcttcgagaagaaccccatcgacttcctggaggccaagggctacaaggaggtgaagaaggacctgatcatcaagctgcccaagtacagcctgttcgagctggagaacggccggaagcggatgctggccagcgccggcgagctgcagaagggcaacgagctggccctgcccagcaagtacgtgaacttcctgtacctggccagccactacgagaagctgaagggcagccccgaggacaacgagcagaagcagctgttcgtggagcagcacaagcactacctggacgagatcatcgagcagatcagcgagttcagcaagcgggtgatcctggccgacgccaacctggacaaggtgctgagcgcctacaacaagcaccgggacaagcccatccgggagcaggccgagaacatcatccacctgttcaccctgaccaacctgggcgcccccgccgccttcaagtacttcgacaccaccatcgaccggaagcggtacaccagcaccaaggaggtgctggacgccaccctgatccaccagagcatcaccggcctgtacgagacccggatcgacctgagccagctgggcggcgacggcggcggcagccccaagaagaagcggaaggtgtga

SEQ ID NO: 819 - DNA, 4140 bp, synthetic construct
  misc_feature 1..4140: note = Synthetic
  source 1..4140: mol_type = other DNA
atggacaagaagtacagcatcggcctggacatcggcacgaacagcgttggctgggctgtgatcacggacgagtacaaggttccctcaaagaagttcaaggtgctgggcaacacggaccggcacagcatcaagaagaatctcatcggtgcactgctgttcgacagcggtgagacggccgaagccacgcggctgaagcggacggcccgccggcggtacacgcggcggaagaaccggatctgctacctgcaggagatcttcagcaacgagatggccaaggtggacgacagcttcttccaccggctggaggagagcttcctggtggaggaggacaagaagcacgagcggcaccccatcttcggcaacatcgtggacgaagtcgcctaccacgagaagtaccccaccatctaccacctgcggaagaagctggtggactcgactgacaaggccgacctgcggctgatctacctggcactggcccacatgataaagttccggggccacttcctgatcgagggcgacctgaaccctgacaacagcgacgtggacaagctgttcatccagctggtgcagacctacaaccagctgttcgaggagaaccccatcaacgccagcggcgtggacgccaaggccatcctcagcgcccgcctcagcaagagccggcggctggagaatctcatcgcccagcttccaggtgagaagaagaatgggctgttcggcaatctcatcgcactcagcctgggcctgactcccaacttcaagagcaacttcgacctggccgaggacgccaagctgcagctcagcaaggacacctacgacgacgacctggacaatctcctggcccagatcggcgaccagtacgccgacctgttcctggctgccaagaatctcagcgacgccatcctgctcagcgacatcctgcgggtgaacacagagatcacgaaggcccccctcagcgccagcatgataaagcggtacgacgagcaccaccaggacctgacgctgctgaaggcactggtgcggcagcagcttccagagaagtacaaggagatcttcttcgaccagagcaagaatgggtacgccgggtacatcgacggtggtgccagccaggaggagttctacaagttcatcaagcccatcctggagaagatggacggcacagaggagctgctggtgaagctgaacagggaggacctgctgcggaagcagcggacgttcgacaatgggagcatcccccaccagatccacctgggtgagctgcacgccatcctgcggcggcaggaggacttctaccccttcctgaaggacaacagggagaagatcgagaagatcctgacgttccggatcccctactacgttggccccctggcccgcggcaacagccggttcgcctggatgacgcggaagagcgaggagacgatcactccctggaacttcgaggaagtcgtggacaagggtgccagcgcccagagcttcatcgagcggatgacgaacttcgacaagaatcttccaaacgagaaggtgcttccaaagcacagcctgctgtacgagtacttcacggtgtacaacgagctgacgaaggtgaagtacgtgacagagggcatgcggaagcccgccttcctcagcggtgagcagaagaaggccatcgtggacctgctgttcaagacgaaccggaaggtgacggtgaagcagctgaaggaggactacttcaagaagatcgagtgcttcgacagcgtggagatcagcggcgtggaggaccggttcaacgccagcctgggcacctaccacgacctgctgaagatcatcaaggacaaggacttcctggacaacgaggagaacgaggacatcctggaggacatcgtgctgacgctgacgctgttcgaggacagggagatgatagaggagcggctgaagacctacgcccacctgttcgacgacaaggtgatgaagcagctgaagcggcggcggtacacgggctggggccggctcagccggaagctgatcaatgggatccgagacaagcagagcggcaagacgatcctggacttcctgaagagcgacggcttcgccaaccggaacttcatgcagctgatccacgacgacagcctgacgttcaaggaggacatccagaaggcccaggtcagcggccagggcgacagcctgcacgagcacatcgccaatctcgccgggagccccgccatcaagaaggggatcctgcagacggtgaaggtggtggacgagctggtgaaggtgatgggccggcacaagccagagaacatcgtgatcgagatggccagggagaaccagacgactcaaaaggggcagaagaacagcagggagcggatgaagcggatcgaggagggcatcaaggagctgggcagccagatcctgaaggagcaccccgtggagaacactcaactgcagaacgagaagctgtacctgtactacctgcagaatgggcgagacatgtacgtggaccaggagctggacatcaaccggctcagcgactacgacgtggaccacatcgttccccagagcttcctgaaggacgacagcatcgacaacaaggtgctgacgcggagcgacaagaaccggggcaagagcgacaacgttccctcagaggaagtcgtgaagaagatgaagaactactggcggcagctgctgaacgccaagctgatcactcaacggaagttcgacaatctcacgaaggccgagcggggtggcctcagcgagctggacaaggccgggttcatcaagcggcagctggtggagacgcggcagatcacgaagcacgtggcccagatcctggacagccggatgaacacgaagtacgacgagaacgacaagctgatcagggaagtcaaggtgatcacgctgaagagcaagctggtcagcgacttccggaaggacttccagttctacaaggtgagggagatcaacaactaccaccacgcccacgacgcctacctgaacgctgtggttggcacggcactgatcaagaagtaccccaagctggagagcgagttcgtgtacggcgactacaaggtgtacgacgtgcggaagatgatagccaagagcgagcaggagatcggcaaggccacggccaagtacttcttctacagcaacatcatgaacttcttcaagacagagatcacgctggccaatggtgagatccggaagcggcccctgatcgagacgaatggtgagacgggtgagatcgtgtgggacaaggggcgagacttcgccacggtgcggaaggtgctcagcatgccccaggtgaacatcgtgaagaagacagaagtccagacgggtggcttcagcaaggagagcatccttccaaagcggaacagcgacaagctgatcgcccgcaagaaggactgggaccccaagaagtacggtggcttcgacagccccaccgtggcctacagcgtgctggtggtggccaaggtggagaaggggaagagcaagaagctgaagagcgtgaaggagctgctgggcatcacgatcatggagcggagcagcttcgagaagaaccccatcgacttcctggaagccaaggggtacaaggaagtcaagaaggacctgatcatcaagcttccaaagtacagcctgttcgagctggagaatgggcggaagcggatgctggccagcgccggtgagctgcagaaggggaacgagctggcacttccctcaaagtacgtgaacttcctgtacctggccagccactacgagaagctgaaggggagcccagaggacaacgagcagaagcagctgttcgtggagcagcacaagcactacctggacgagatcatcgagcagatcagcgagttcagcaagcgggtgatcctggccgacgccaatctcgacaaggtgctcagcgcctacaacaagcaccgagacaagcccatcagggagcaggccgagaacatcatccacctgttcacgctgacgaatctcggtgcccccgctgccttcaagtacttcgacacgacgatcgaccggaagcggtacacgtcgactaaggaagtcctggacgccacgctgatccaccagagcatcacgggcctgtacgagacgcggatcgacctcagccagctgggtggcgacggtggtggcagccccaagaagaagcggaaggtgtag

SEQ ID NO: 820 - DNA, 4440 bp, synthetic construct
  misc_feature 1..4440: note = Synthetic
  source 1..4440: mol_type = other DNA
atggacaagaagtacagcatcggactggacatcggaacaaacagcgtcggatgggcagtcatcacagacgaatacaaggtcccgagcaagaagttcaaggtcctgggaaacacagacagacacagcatcaagaagaacctgatcggagcactgctgttcgacagcggagaaacagcagaagcaacaagactgaagagaacagcaagaagaagatacacaagaagaaagaacagaatctgctacctgcaggaaatcttcagcaacgaaatggcaaaggtcgacgacagcttcttccacagactggaagaaagcttcctggtcgaagaagacaagaagcacgaaagacacccgatcttcggaaacatcgtcgacgaagtcgcataccacgaaaagtacccgacaatctaccacctgagaaagaagctggtcgacagcacagacaaggcagacctgagactgatctacctggcactggcacacatgatcaagttcagaggacacttcctgatcgaaggagacctgaacccggacaacagcgacgtcgacaagctgttcatccagctggtccagacatacaaccagctgttcgaagaaaacccgatcaacgcaagcggagtcgacgcaaaggcaatcctgagcgcaagactgagcaagagcagaagactggaaaacctgatcgcacagctgccgggagaaaagaagaacggactgttcggaaacctgatcgcactgagcctgggactgacaccgaacttcaagagcaacttcgacctggcagaagacgcaaagctgcagctgagcaaggacacatacgacgacgacctggacaacctgctggcacagatcggagaccagtacgcagacctgttcctggcagcaaagaacctgagcgacgcaatcctgctgagcgacatcctgagagtcaacacagaaatcacaaaggcaccgctgagcgcaagcatgatcaagagatacgacgaacaccaccaggacctgacactgctgaaggcactggtcagacagcagctgccggaaaagtacaaggaaatcttcttcgaccagagcaagaacggatacgcaggatacatcgacggaggagcaagccaggaagaattctacaagttcatcaagccgatcctggaaaagatggacggaacagaagaactgctggtcaagctgaacagagaagacctgctgagaaagcagagaacattcgacaacggaagcatcccgcaccagatccacctgggagaactgcacgcaatcctgagaagacaggaagacttctacccgttcctgaaggacaacagagaaaagatcgaaaagatcctgacattcagaatcccgtactacgtcggaccgctggcaagaggaaacagcagattcgcatggatgacaagaaagagcgaagaaacaatcacaccgtggaacttcgaagaagtcgtcgacaagggagcaagcgcacagagcttcatcgaaagaatgacaaacttcgacaagaacctgccgaacgaaaaggtcctgccgaagcacagcctgctgtacgaatacttcacagtctacaacgaactgacaaaggtcaagtacgtcacagaaggaatgagaaagccggcattcctgagcggagaacagaagaaggcaatcgtcgacctgctgttcaagacaaacagaaaggtcacagtcaagcagctgaaggaagactacttcaagaagatcgaatgcttcgacagcgtcgaaatcagcggagtcgaagacagattcaacgcaagcctgggaacataccacgacctgctgaagatcatcaaggacaaggacttcctggacaacgaagaaaacgaagacatcctggaagacatcgtcctgacactgacactgttcgaagacagagaaatgatcgaagaaagactgaagacatacgcacacctgttcgacgacaaggtcatgaagcagctgaagagaagaagatacacaggatggggaagactgagcagaaagctgatcaacggaatcagagacaagcagagcggaaagacaatcctggacttcctgaagagcgacggattcgcaaacagaaacttcatgcagctgatccacgacgacagcctgacattcaaggaagacatccagaaggcacaggtcagcggacagggagacagcctgcacgaacacatcgcaaacctggcaggaagcccggcaatcaagaagggaatcctgcagacagtcaaggtcgtcgacgaactggtcaaggtcatgggaagacacaagccggaaaacatcgtcatcgaaatggcaagagaaaaccagacaacacagaagggacagaagaacagcagagaaagaatgaagagaatcgaagaaggaatcaaggaactgggaagccagatcctgaaggaacacccggtcgaaaacacacagctgcagaacgaaaagctgtacctgtactacctgcagaacggaagagacatgtacgtcgaccaggaactggacatcaacagactgagcgactacgacgtcgaccacatcgtcccgcagagcttcctgaaggacgacagcatcgacaacaaggtcctgacaagaagcgacaagaacagaggaaagagcgacaacgtcccgagcgaagaagtcgtcaagaagatgaagaactactggagacagctgctgaacgcaaagctgatcacacagagaaagttcgacaacctgacaaaggcagagagaggaggactgagcgaactggacaaggcaggattcatcaagagacagctggtcgaaacaagacagatcacaaagcacgtcgcacagatcctggacagcagaatgaacacaaagtacgacgaaaacgacaagctgatcagagaagtcaaggtcatcacactgaagagcaagctggtcagcgacttcagaaaggacttccagttctacaaggtcagagaaatcaacaactaccaccacgcacacgacgcatacctgaacgcagtcgtcggaacagcactgatcaagaagtacccgaagctggaaagcgaattcgtctacggagactacaaggtctacgacgtcagaaagatgatcgcaaagagcgaacaggaaatcggaaaggcaacagcaaagtacttcttctacagcaacatcatgaacttcttcaagacagaaatcacactggcaaacggagaaatcagaaagagaccgctgatcgaaacaaacggagaaacaggagaaatcgtctgggacaagggaagagacttcgcaacagtcagaaaggtcctgagcatgccgcaggtcaacatcgtcaagaagacagaagtccagacaggaggattcagcaaggaaagcatcctgccgaagagaaacagcgacaagctgatcgcaagaaagaaggactgggacccgaagaagtacggaggattcgacagcccgacagtcgcatacagcgtcctggtcgtcgcaaaggtcgaaaagggaaagagcaagaagctgaagagcgtcaaggaactgctgggaatcacaatcatggaaagaagcagcttcgaaaagaacccgatcgacttcctggaagcaaagggatacaaggaagtcaagaaggacctgatcatcaagctgccgaagtacagcctgttcgaactggaaaacggaagaaagagaatgctggcaagcgcaggagaactgcagaagggaaacgaactggcactgccgagcaagtacgtcaacttcctgtacctggcaagccactacgaaaagctgaagggaagcccggaagacaacgaacagaagcagctgttcgtcgaacagcacaagcactacctggacgaaatcatcgaacagatcagcgaattcagcaagagagtcatcctggcagacgcaaacctggacaaggtcctgagcgcatacaacaagcacagagacaagccgatcagagaacaggcagaaaacatcatccacctgttcacactgacaaacctgggagcaccggcagcattcaagtacttcgacacaacaatcgacagaaagagatacacaagcacaaaggaagtcctggacgcaacactgatccaccagagcatcacaggactgtacgaaacaagaatcgacctgagccagctgggaggagacggaggaggaagcccgaagaagaagagaaaggtctagctagccatcacatttaaaagcatctcagcctaccatgagaataagagaaagaaaatgaagatcaatagcttattcatctctttttctttttcgttggtgtaaagccaacaccctgtctaaaaaacataaatttctttaatcattttgcctcttttctctgtgcttcaattaataaaaaatggaaagaacctcgagaaaaaaaaaaaaaaaaaaaaaaaaaaaaaaaaaaaaaaaaaaaaaaaaaaaaaaaaaaaaaaaaaaaaaaaaaaaaaaaaaaaaaaaaaaaaaaaaaaaatctag

SEQ ID NO: 821 - DNA, 5342 bp, synthetic construct
  misc_feature 1..5342: note = Synthetic
  source 1..5342: mol_type = other DNA
gggaagctcagaataaacgctcaactttggccggatctgccaccatggaggcctcccccgcctccggcccccggcacctgatggacccccacatcttcacctccaacttcaacaacggcatcggccggcacaagacctacctgtgctacgaggtggagcggctggacaacggcacctccgtgaagatggaccagcaccggggcttcctgcacaaccaggccaagaacctgctgtgcggcttctacggccggcacgccgagctgcggttcctggacctggtgccctccctgcagctggaccccgcccagatctaccgggtgacctggttcatctcctggtccccctgcttctcctggggctgcgccggcgaggtgcgggccttcctgcaggagaacacccacgtgcggctgcggatcttcgccgcccggatctacgactacgaccccctgtacaaggaggccctgcagatgctgcgggacgccggcgcccaggtgtccatcatgacctacgacgagttcaagcactgctgggacaccttcgtggaccaccagggctgccccttccagccctgggacggcctggacgagcactcccaggccctgtccggccggctgcgggccatcctgcagaaccagggcaactccggctccgagacccccggcacctccgagtccgccacccccgagtccgacaagaagtactccatcggcctggccatcggcaccaactccgtgggctgggccgtgatcaccgacgagtacaaggtgccctccaagaagttcaaggtgctgggcaacaccgaccggcactccatcaagaagaacctgatcggcgccctgctgttcgactccggcgagaccgccgaggccacccggctgaagcggaccgcccggcggcggtacacccggcggaagaaccggatctgctacctgcaggagatcttctccaacgagatggccaaggtggacgactccttcttccaccggctggaggagtccttcctggtggaggaggacaagaagcacgagcggcaccccatcttcggcaacatcgtggacgaggtggcctaccacgagaagtaccccaccatctaccacctgcggaagaagctggtggactccaccgacaaggccgacctgcggctgatctacctggccctggcccacatgatcaagttccggggccacttcctgatcgagggcgacctgaaccccgacaactccgacgtggacaagctgttcatccagctggtgcagacctacaaccagctgttcgaggagaaccccatcaacgcctccggcgtggacgccaaggccatcctgtccgcccggctgtccaagtcccggcggctggagaacctgatcgcccagctgcccggcgagaagaagaacggcctgttcggcaacctgatcgccctgtccctgggcctgacccccaacttcaagtccaacttcgacctggccgaggacgccaagctgcagctgtccaaggacacctacgacgacgacctggacaacctgctggcccagatcggcgaccagtacgccgacctgttcctggccgccaagaacctgtccgacgccatcctgctgtccgacatcctgcgggtgaacaccgagatcaccaaggcccccctgtccgcctccatgatcaagcggtacgacgagcaccaccaggacctgaccctgctgaaggccctggtgcggcagcagctgcccgagaagtacaaggagatcttcttcgaccagtccaagaacggctacgccggctacatcgacggcggcgcctcccaggaggagttctacaagttcatcaagcccatcctggagaagatggacggcaccgaggagctgctggtgaagctgaaccgggaggacctgctgcggaagcagcggaccttcgacaacggctccatcccccaccagatccacctgggcgagctgcacgccatcctgcggcggcaggaggacttctaccccttcctgaaggacaaccgggagaagatcgagaagatcctgaccttccggatcccctactacgtgggccccctggcccggggcaactcccggttcgcctggatgacccggaagtccgaggagaccatcaccccctggaacttcgaggaggtggtggacaagggcgcctccgcccagtccttcatcgagcggatgaccaacttcgacaagaacctgcccaacgagaaggtgctgcccaagcactccctgctgtacgagtacttcaccgtgtacaacgagctgaccaaggtgaagtacgtgaccgagggcatgcggaagcccgccttcctgtccggcgagcagaagaaggccatcgtggacctgctgttcaagaccaaccggaaggtgaccgtgaagcagctgaaggaggactacttcaagaagatcgagtgcttcgactccgtggagatctccggcgtggaggaccggttcaacgcctccctgggcacctaccacgacctgctgaagatcatcaaggacaaggacttcctggacaacgaggagaacgaggacatcctggaggacatcgtgctgaccctgaccctgttcgaggaccgggagatgatcgaggagcggctgaagacctacgcccacctgttcgacgacaaggtgatgaagcagctgaagcggcggcggtacaccggctggggccggctgtcccggaagctgatcaacggcatccgggacaagcagtccggcaagaccatcctggacttcctgaagtccgacggcttcgccaaccggaacttcatgcagctgatccacgacgactccctgaccttcaaggaggacatccagaaggcccaggtgtccggccagggcgactccctgcacgagcacatcgccaacctggccggctcccccgccatcaagaagggcatcctgcagaccgtgaaggtggtggacgagctggtgaaggtgatgggccggcacaagcccgagaacatcgtgatcgagatggcccgggagaaccagaccacccagaagggccagaagaactcccgggagcggatgaagcggatcgaggagggcatcaaggagctgggctcccagatcctgaaggagcaccccgtggagaacacccagctgcagaacgagaagctgtacctgtactacctgcagaacggccgggacatgtacgtggaccaggagctggacatcaaccggctgtccgactacgacgtggaccacatcgtgccccagtccttcctgaaggacgactccatcgacaacaaggtgctgacccggtccgacaagaaccggggcaagtccgacaacgtgccctccgaggaggtggtgaagaagatgaagaactactggcggcagctgctgaacgccaagctgatcacccagcggaagttcgacaacctgaccaaggccgagcggggcggcctgtccgagctggacaaggccggcttcatcaagcggcagctggtggagacccggcagatcaccaagcacgtggcccagatcctggactcccggatgaacaccaagtacgacgagaacgacaagctgatccgggaggtgaaggtgatcaccctgaagtccaagctggtgtccgacttccggaaggacttccagttctacaaggtgcgggagatcaacaactaccaccacgcccacgacgcctacctgaacgccgtggtgggcaccgccctgatcaagaagtaccccaagctggagtccgagttcgtgtacggcgactacaaggtgtacgacgtgcggaagatgatcgccaagtccgagcaggagatcggcaaggccaccgccaagtacttcttctactccaacatcatgaacttcttcaagaccgagatcaccctggccaacggcgagatccggaagcggcccctgatcgagaccaacggcgagaccggcgagatcgtgtgggacaagggccgggacttcgccaccgtgcggaaggtgctgtccatgccccaggtgaacatcgtgaagaagaccgaggtgcagaccggcggcttctccaaggagtccatcctgcccaagcggaactccgacaagctgatcgcccggaagaaggactgggaccccaagaagtacggcggcttcgactcccccaccgtggcctactccgtgctggtggtggccaaggtggagaagggcaagtccaagaagctgaagtccgtgaaggagctgctgggcatcaccatcatggagcggtcctccttcgagaagaaccccatcgacttcctggaggccaagggctacaaggaggtgaagaaggacctgatcatcaagctgcccaagtactccctgttcgagctggagaacggccggaagcggatgctggcctccgccggcgagctgcagaagggcaacgagctggccctgccctccaagtacgtgaacttcctgtacctggcctcccactacgagaagctgaagggctcccccgaggacaacgagcagaagcagctgttcgtggagcagcacaagcactacctggacgagatcatcgagcagatctccgagttctccaagcgggtgatcctggccgacgccaacctggacaaggtgctgtccgcctacaacaagcaccgggacaagcccatccgggagcaggccgagaacatcatccacctgttcaccctgaccaacctgggcgcccccgccgccttcaagtacttcgacaccaccatcgaccggaagcggtacacctccaccaaggaggtgctggacgccaccctgatccaccagtccatcaccggcctgtacgagacccggatcgacctgtcccagctgggcggcgacggcggcggctcccccaagaagaagcggaaggtgtgactagcaccagcctcaagaacacccgaatggagtctctaagctacataataccaacttacactttacaaaatgttgtcccccaaaatgtagccattcgtatctgctcctaataaaaagaaagtttcttcacattctctcgagaaaaaaaaaaaatggaaaaaaaaaaaacggaaaaaaaaaaaaggtaaaaaaaaaaaatataaaaaaaaaaaacataaaaaaaaaaaacgaaaaaaaaaaaacgtaaaaaaaaaaaactcaaaaaaaaaaaagataaaaaaaaaaaacctaaaaaaaaaaaatgtaaaaaaaaaaaagggaaaaaaaaaaaacgcaaaaaaaaaaaacacaaaaaaaaaaaatgcaaaaaaaaaaaatcgaaaaaaaaaaaatctaaaaaaaaaaaacgaaaaaaaaaaaacccaaaaaaaaaaaagacaaaaaaaaaaaatagaaaaaaaaaaaagttaaaaaaaaaaaactgaaaaaaaaaaaatttaaaaaaaaaaaatctag

SEQ ID NO: 822 - DNA, 5399 bp, synthetic construct
  misc_feature 1..5399: note = Synthetic
  source 1..5399: mol_type = other DNA
gggaagctcagaataaacgctcaactttggccggatctgccaccatggaggcctcccccgcctccggcccccggcacctgatggacccccacatcttcacctccaacttcaacaacggcatcggccggcacaagacctacctgtgctacgaggtggagcggctggacaacggcacctccgtgaagatggaccagcaccggggcttcctgcacaaccaggccaagaacctgctgtgcggcttctacggccggcacgccgagctgcggttcctggacctggtgccctccctgcagctggaccccgcccagatctaccgggtgacctggttcatctcctggtccccctgcttctcctggggctgcgccggcgaggtgcgggccttcctgcaggagaacacccacgtgcggctgcggatcttcgccgcccggatctacgactacgaccccctgtacaaggaggccctgcagatgctgcgggacgccggcgcccaggtgtccatcatgacctacgacgagttcaagcactgctgggacaccttcgtggaccaccagggctgccccttccagccctgggacggcctggacgagcactcccaggccctgtccggccggctgcgggccatcctgcagaaccagggcaactccggctccgagacccccggcacctccgagtccgccacccccgagtccgacaagaagtactccatcggcctggccatcggcaccaactccgtgggctgggccgtgatcaccgacgagtacaaggtgccctccaagaagttcaaggtgctgggcaacaccgaccggcactccatcaagaagaacctgatcggcgccctgctgttcgactccggcgagaccgccgaggccacccggctgaagcggaccgcccggcggcggtacacccggcggaagaaccggatctgctacctgcaggagatcttctccaacgagatggccaaggtggacgactccttcttccaccggctggaggagtccttcctggtggaggaggacaagaagcacgagcggcaccccatcttcggcaacatcgtggacgaggtggcctaccacgagaagtaccccaccatctaccacctgcggaagaagctggtggactccaccgacaaggccgacctgcggctgatctacctggccctggcccacatgatcaagttccggggccacttcctgatcgagggcgacctgaaccccgacaactccgacgtggacaagctgttcatccagctggtgcagacctacaaccagctgttcgaggagaaccccatcaacgcctccggcgtggacgccaaggccatcctgtccgcccggctgtccaagtcccggcggctggagaacctgatcgcccagctgcccggcgagaagaagaacggcctgttcggcaacctgatcgccctgtccctgggcctgacccccaacttcaagtccaacttcgacctggccgaggacgccaagctgcagctgtccaaggacacctacgacgacgacctggacaacctgctggcccagatcggcgaccagtacgccgacctgttcctggccgccaagaacctgtccgacgccatcctgctgtccgacatcctgcgggtgaacaccgagatcaccaaggcccccctgtccgcctccatgatcaagcggtacgacgagcaccaccaggacctgaccctgctgaaggccctggtgcggcagcagctgcccgagaagtacaaggagatcttcttcgaccagtccaagaacggctacgccggctacatcgacggcggcgcctcccaggaggagttctacaagttcatcaagcccatcctggagaagatggacggcaccgaggagctgctggtgaagctgaaccgggaggacctgctgcggaagcagcggaccttcgacaacggctccatcccccaccagatccacctgggcgagctgcacgccatcctgcggcggcaggaggacttctaccccttcctgaaggacaaccgggagaagatcgagaagatcctgaccttccggatcccctactacgtgggccccctggcccggggcaactcccggttcgcctggatgacccggaagtccgaggagaccatcaccccctggaacttcgaggaggtggtggacaagggcgcctccgcccagtccttcatcgagcggatgaccaacttcgacaagaacctgcccaacgagaaggtgctgcccaagcactccctgctgtacgagtacttcaccgtgtacaacgagctgaccaaggtgaagtacgtgaccgagggcatgcggaagcccgccttcctgtccggcgagcagaagaaggccatcgtggacctgctgttcaagaccaaccggaaggtgaccgtgaagcagctgaaggaggactacttcaagaagatcgagtgcttcgactccgtggagatctccggcgtggaggaccggttcaacgcctccctgggcacctaccacgacctgctgaagatcatcaaggacaaggacttcctggacaacgaggagaacgaggacatcctggaggacatcgtgctgaccctgaccctgttcgaggaccgggagatgatcgaggagcggctgaagacctacgcccacctgttcgacgacaaggtgatgaagcagctgaagcggcggcggtacaccggctggggccggctgtcccggaagctgatcaacggcatccgggacaagcagtccggcaagaccatcctggacttcctgaagtccgacggcttcgccaaccggaacttcatgcagctgatccacgacgactccctgaccttcaaggaggacatccagaaggcccaggtgtccggccagggcgactccctgcacgagcacatcgccaacctggccggctcccccgccatcaagaagggcatcctgcagaccgtgaaggtggtggacgagctggtgaaggtgatgggccggcacaagcccgagaacatcgtgatcgagatggcccgggagaaccagaccacccagaagggccagaagaactcccgggagcggatgaagcggatcgaggagggcatcaaggagctgggctcccagatcctgaaggagcaccccgtggagaacacccagctgcagaacgagaagctgtacctgtactacctgcagaacggccgggacatgtacgtggaccaggagctggacatcaaccggctgtccgactacgacgtggaccacatcgtgccccagtccttcctgaaggacgactccatcgacaacaaggtgctgacccggtccgacaagaaccggggcaagtccgacaacgtgccctccgaggaggtggtgaagaagatgaagaactactggcggcagctgctgaacgccaagctgatcacccagcggaagttcgacaacctgaccaaggccgagcggggcggcctgtccgagctggacaaggccggcttcatcaagcggcagctggtggagacccggcagatcaccaagcacgtggcccagatcctggactcccggatgaacaccaagtacgacgagaacgacaagctgatccgggaggtgaaggtgatcaccctgaagtccaagctggtgtccgacttccggaaggacttccagttctacaaggtgcgggagatcaacaactaccaccacgcccacgacgcctacctgaacgccgtggtgggcaccgccctgatcaagaagtaccccaagctggagtccgagttcgtgtacggcgactacaaggtgtacgacgtgcggaagatgatcgccaagtccgagcaggagatcggcaaggccaccgccaagtacttcttctactccaacatcatgaacttcttcaagaccgagatcaccctggccaacggcgagatccggaagcggcccctgatcgagaccaacggcgagaccggcgagatcgtgtgggacaagggccgggacttcgccaccgtgcggaaggtgctgtccatgccccaggtgaacatcgtgaagaagaccgaggtgcagaccggcggcttctccaaggagtccatcctgcccaagcggaactccgacaagctgatcgcccggaagaaggactgggaccccaagaagtacggcggcttcgactcccccaccgtggcctactccgtgctggtggtggccaaggtggagaagggcaagtccaagaagctgaagtccgtgaaggagctgctgggcatcaccatcatggagcggtcctccttcgagaagaaccccatcgacttcctggaggccaagggctacaaggaggtgaagaaggacctgatcatcaagctgcccaagtactccctgttcgagctggagaacggccggaagcggatgctggcctccgccggcgagctgcagaagggcaacgagctggccctgccctccaagtacgtgaacttcctgtacctggcctcccactacgagaagctgaagggctcccccgaggacaacgagcagaagcagctgttcgtggagcagcacaagcactacctggacgagatcatcgagcagatctccgagttctccaagcgggtgatcctggccgacgccaacctggacaaggtgctgtccgcctacaacaagcaccgggacaagcccatccgggagcaggccgagaacatcatccacctgttcaccctgaccaacctgggcgcccccgccgccttcaagtacttcgacaccaccatcgaccggaagcggtacacctccaccaaggaggtgctggacgccaccctgatccaccagtccatcaccggcctgtacgagacccggatcgacctgtcccagctgggcggcgacggcggcggctcccccaagaagaagcggaaggtgtccgagtccgccacccccgagtccgtgtccggctggcggctgttcaagaagatctcctgactagcaccagcctcaagaacacccgaatggagtctctaagctacataataccaacttacactttacaaaatgttgtcccccaaaatgtagccattcgtatctgctcctaataaaaagaaagtttcttcacattctctcgagaaaaaaaaaaaatggaaaaaaaaaaaacggaaaaaaaaaaaaggtaaaaaaaaaaaatataaaaaaaaaaaacataaaaaaaaaaaacgaaaaaaaaaaaacgtaaaaaaaaaaaactcaaaaaaaaaaaagataaaaaaaaaaaacctaaaaaaaaaaaatgtaaaaaaaaaaaagggaaaaaaaaaaaacgcaaaaaaaaaaaacacaaaaaaaaaaaatgcaaaaaaaaaaaatcgaaaaaaaaaaaatctaaaaaaaaaaaacgaaaaaaaaaaaacccaaaaaaaaaaaagacaaaaaaaaaaaatagaaaaaaaaaaaagttaaaaaaaaaaaactgaaaaaaaaaaaatttaaaaaaaaaaaatctag

SEQ ID NO: 823 - DNA, 324 bp, synthetic construct
  misc_feature 1..324: note = Synthetic
  source 1..324: mol_type = other DNA
atgaccaacctgtccgacatcatcgagaaggagaccggcaagcagctggtgatccaggagtccatcctgatgctgcccgaggaggtggaggaggtgatcggcaacaagcccgagtccgacatcctggtgcacaccgcctacgacgagtccaccgacgagaacgtgatgctgctgacctccgacgcccccgagtacaagccctgggccctggtgatccaggactccaacggcgagaacaagatcaagatgctgtccggcggctccaagcggaccgccgacggctccgagttcgagtcccccaagaagaagcggaaggtggagtga

SEQ ID NO: 824 - DNA, 291 bp, synthetic construct
  misc_feature 1..291: note = Synthetic
  source 1..291: mol_type = other DNA
atgggaccgaagaagaagagaaaggtcggaggaggaagcacaaacctgtcggacatcatcgaaaaggaaacaggaaagcagctggtcatccaggaatcgatcctgatgctgccggaagaagtcgaagaagtcatcggaaacaagccggaatcggacatcctggtccacacagcatacgacgaatcgacagacgaaaacgtcatgctgctgacatcggacgcaccggaatacaagccgtgggcactggtcatccaggactcgaacggagaaaacaagatcaagatgctgtga

SEQ ID NO: 825 - DNA, 381 bp, synthetic construct
  misc_feature 1..381: note = Synthetic
  source 1..381: mol_type = other DNA
atgaccaacctgtccgacatcatcgagaaggagaccggcaagcagctggtgatccaggagtccatcctgatgctgcccgaggaggtggaggaggtgatcggcaacaagcccgagtccgacatcctggtgcacaccgcctacgacgagtccaccgacgagaacgtgatgctgctgacctccgacgcccccgagtacaagccctgggccctggtgatccaggactccaacggcgagaacaagatcaagatgctgtccggcggctccaagcggaccgccgacggctccgagttcgagtcccccaagaagaagcggaaggtggagtccgagtccgccacccccgagtccgtgtccggctggcggctgttcaagaagatctcctga

SEQ ID NO: 826 - DNA, 327 bp, synthetic construct
  misc_feature 1..327: note = Synthetic
  source 1..327: mol_type = other DNA
atgaccaacctgtccgacatcatcgagaaggagaccggcaagcagctggtgatccaggagtccatcctgatgctgcccgaggaggtggaggaggtgatcggcaacaagcccgagtccgacatcctggtgcacaccgcctacgacgagtccaccgacgagaacgtgatgctgctgacctccgacgcccccgagtacaagccctgggccctggtgatccaggactccaacggcgagaacaagatcaagatgctgtccggcggctccaagcggaccgccgacggctccgagttcgagtcccccaagaagaagcggaaggtggagtgatag

SEQ ID NO: 827 - DNA, 4140 bp, synthetic construct
  misc_feature 1..4140: note = Synthetic
  source 1..4140: mol_type = other DNA
atggacaagaagtactccatcggcctggccatcggcaccaactccgtgggctgggccgtgatcaccgacgagtacaaggtgccctccaagaagttcaaggtgctgggcaacaccgaccggcactccatcaagaagaacctgatcggcgccctgctgttcgactccggcgagaccgccgaggccacccggctgaagcggaccgcccggcggcggtacacccggcggaagaaccggatctgctacctgcaggagatcttctccaacgagatggccaaggtggacgactccttcttccaccggctggaggagtccttcctggtggaggaggacaagaagcacgagcggcaccccatcttcggcaacatcgtggacgaggtggcctaccacgagaagtaccccaccatctaccacctgcggaagaagctggtggactccaccgacaaggccgacctgcggctgatctacctggccctggcccacatgatcaagttccggggccacttcctgatcgagggcgacctgaaccccgacaactccgacgtggacaagctgttcatccagctggtgcagacctacaaccagctgttcgaggagaaccccatcaacgcctccggcgtggacgccaaggccatcctgtccgcccggctgtccaagtcccggcggctggagaacctgatcgcccagctgcccggcgagaagaagaacggcctgttcggcaacctgatcgccctgtccctgggcctgacccccaacttcaagtccaacttcgacctggccgaggacgccaagctgcagctgtccaaggacacctacgacgacgacctggacaacctgctggcccagatcggcgaccagtacgccgacctgttcctggccgccaagaacctgtccgacgccatcctgctgtccgacatcctgcgggtgaacaccgagatcaccaaggcccccctgtccgcctccatgatcaagcggtacgacgagcaccaccaggacctgaccctgctgaaggccctggtgcggcagcagctgcccgagaagtacaaggagatcttcttcgaccagtccaagaacggctacgccggctacatcgacggcggcgcctcccaggaggagttctacaagttcatcaagcccatcctggagaagatggacggcaccgaggagctgctggtgaagctgaaccgggaggacctgctgcggaagcagcggaccttcgacaacggctccatcccccaccagatccacctgggcgagctgcacgccatcctgcggcggcaggaggacttctaccccttcctgaaggacaaccgggagaagatcgagaagatcctgaccttccggatcccctactacgtgggccccctggcccggggcaactcccggttcgcctggatgacccggaagtccgaggagaccatcaccccctggaacttcgaggaggtggtggacaagggcgcctccgcccagtccttcatcgagcggatgaccaacttcgacaagaacctgcccaacgagaaggtgctgcccaagcactccctgctgtacgagtacttcaccgtgtacaacgagctgaccaaggtgaagtacgtgaccgagggcatgcggaagcccgccttcctgtccggcgagcagaagaaggccatcgtggacctgctgttcaagaccaaccggaaggtgaccgtgaagcagctgaaggaggactacttcaagaagatcgagtgcttcgactccgtggagatctccggcgtggaggaccggttcaacgcctccctgggcacctaccacgacctgctgaagatcatcaaggacaaggacttcctggacaacgaggagaacgaggacatcctggaggacatcgtgctgaccctgaccctgttcgaggaccgggagatgatcgaggagcggctgaagacctacgcccacctgttcgacgacaaggtgatgaagcagctgaagcggcggcggtacaccggctggggccggctgtcccggaagctgatcaacggcatccgggacaagcagtccggcaagaccatcctggacttcctgaagtccgacggcttcgccaaccggaacttcatgcagctgatccacgacgactccctgaccttcaaggaggacatccagaaggcccaggtgtccggccagggcgactccctgcacgagcacatcgccaacctggccggctcccccgccatcaagaagggcatcctgcagaccgtgaaggtggtggacgagctggtgaaggtgatgggccggcacaagcccgagaacatcgtgatcgagatggcccgggagaaccagaccacccagaagggccagaagaactcccgggagcggatgaagcggatcgaggagggcatcaaggagctgggctcccagatcctgaaggagcaccccgtggagaacacccagctgcagaacgagaagctgtacctgtactacctgcagaacggccgggacatgtacgtggaccaggagctggacatcaaccggctgtccgactacgacgtggaccacatcgtgccccagtccttcctgaaggacgactccatcgacaacaaggtgctgacccggtccgacaagaaccggggcaagtccgacaacgtgccctccgaggaggtggtgaagaagatgaagaactactggcggcagctgctgaacgccaagctgatcacccagcggaagttcgacaacctgaccaaggccgagcggggcggcctgtccgagctggacaaggccggcttcatcaagcggcagctggtggagacccggcagatcaccaagcacgtggcccagatcctggactcccggatgaacaccaagtacgacgagaacgacaagctgatccgggaggtgaaggtgatcaccctgaagtccaagctggtgtccgacttccggaaggacttccagttctacaaggtgcgggagatcaacaactaccaccacgcccacgacgcctacctgaacgccgtggtgggcaccgccctgatcaagaagtaccccaagctggagtccgagttcgtgtacggcgactacaaggtgtacgacgtgcggaagatgatcgccaagtccgagcaggagatcggcaaggccaccgccaagtacttcttctactccaacatcatgaacttcttcaagaccgagatcaccctggccaacggcgagatccggaagcggcccctgatcgagaccaacggcgagaccggcgagatcgtgtgggacaagggccgggacttcgccaccgtgcggaaggtgctgtccatgccccaggtgaacatcgtgaagaagaccgaggtgcagaccggcggcttctccaaggagtccatcctgcccaagcggaactccgacaagctgatcgcccggaagaaggactgggaccccaagaagtacggcggcttcgactcccccaccgtggcctactccgtgctggtggtggccaaggtggagaagggcaagtccaagaagctgaagtccgtgaaggagctgctgggcatcaccatcatggagcggtcctccttcgagaagaaccccatcgacttcctggaggccaagggctacaaggaggtgaagaaggacctgatcatcaagctgcccaagtactccctgttcgagctggagaacggccggaagcggatgctggcctccgccggcgagctgcagaagggcaacgagctggccctgccctccaagtacgtgaacttcctgtacctggcctcccactacgagaagctgaagggctcccccgaggacaacgagcagaagcagctgttcgtggagcagcacaagcactacctggacgagatcatcgagcagatctccgagttctccaagcgggtgatcctggccgacgccaacctggacaaggtgctgtccgcctacaacaagcaccgggacaagcccatccgggagcaggccgagaacatcatccacctgttcaccctgaccaacctgggcgcccccgccgccttcaagtacttcgacaccaccatcgaccggaagcggtacacctccaccaaggaggtgctggacgccaccctgatccaccagtccatcaccggcctgtacgagacccggatcgacctgtcccagctgggcggcgacggcggcggctcccccaagaagaagcggaaggtgtga

SEQ ID NO: 828 - DNA, 4107 bp, synthetic construct
  misc_feature 1..4107: note = Synthetic
  source 1..4107: mol_type = other DNA
atggacaagaagtactccatcggcctggccatcggcaccaactccgtgggctgggccgtgatcaccgacgagtacaaggtgccctccaagaagttcaaggtgctgggcaacaccgaccggcactccatcaagaagaacctgatcggcgccctgctgttcgactccggcgagaccgccgaggccacccggctgaagcggaccgcccggcggcggtacacccggcggaagaaccggatctgctacctgcaggagatcttctccaacgagatggccaaggtggacgactccttcttccaccggctggaggagtccttcctggtggaggaggacaagaagcacgagcggcaccccatcttcggcaacatcgtggacgaggtggcctaccacgagaagtaccccaccatctaccacctgcggaagaagctggtggactccaccgacaaggccgacctgcggctgatctacctggccctggcccacatgatcaagttccggggccacttcctgatcgagggcgacctgaaccccgacaactccgacgtggacaagctgttcatccagctggtgcagacctacaaccagctgttcgaggagaaccccatcaacgcctccggcgtggacgccaaggccatcctgtccgcccggctgtccaagtcccggcggctggagaacctgatcgcccagctgcccggcgagaagaagaacggcctgttcggcaacctgatcgccctgtccctgggcctgacccccaacttcaagtccaacttcgacctggccgaggacgccaagctgcagctgtccaaggacacctacgacgacgacctggacaacctgctggcccagatcggcgaccagtacgccgacctgttcctggccgccaagaacctgtccgacgccatcctgctgtccgacatcctgcgggtgaacaccgagatcaccaaggcccccctgtccgcctccatgatcaagcggtacgacgagcaccaccaggacctgaccctgctgaaggccctggtgcggcagcagctgcccgagaagtacaaggagatcttcttcgaccagtccaagaacggctacgccggctacatcgacggcggcgcctcccaggaggagttctacaagttcatcaagcccatcctggagaagatggacggcaccgaggagctgctggtgaagctgaaccgggaggacctgctgcggaagcagcggaccttcgacaacggctccatcccccaccagatccacctgggcgagctgcacgccatcctgcggcggcaggaggacttctaccccttcctgaaggacaaccgggagaagatcgagaagatcctgaccttccggatcccctactacgtgggccccctggcccggggcaactcccggttcgcctggatgacccggaagtccgaggagaccatcaccccctggaacttcgaggaggtggtggacaagggcgcctccgcccagtccttcatcgagcggatgaccaacttcgacaagaacctgcccaacgagaaggtgctgcccaagcactccctgctgtacgagtacttcaccgtgtacaacgagctgaccaaggtgaagtacgtgaccgagggcatgcggaagcccgccttcctgtccggcgagcagaagaaggccatcgtggacctgctgttcaagaccaaccggaaggtgaccgtgaagcagctgaaggaggactacttcaagaagatcgagtgcttcgactccgtggagatctccggcgtggaggaccggttcaacgcctccctgggcacctaccacgacctgctgaagatcatcaaggacaaggacttcctggacaacgaggagaacgaggacatcctggaggacatcgtgctgaccctgaccctgttcgaggaccgggagatgatcgaggagcggctgaagacctacgcccacctgttcgacgacaaggtgatgaagcagctgaagcggcggcggtacaccggctggggccggctgtcccggaagctgatcaacggcatccgggacaagcagtccggcaagaccatcctggacttcctgaagtccgacggcttcgccaaccggaacttcatgcagctgatccacgacgactccctgaccttcaaggaggacatccagaaggcccaggtgtccggccagggcgactccctgcacgagcacatcgccaacctggccggctcccccgccatcaagaagggcatcctgcagaccgtgaaggtggtggacgagctggtgaaggtgatgggccggcacaagcccgagaacatcgtgatcgagatggcccgggagaaccagaccacccagaagggccagaagaactcccgggagcggatgaagcggatcgaggagggcatcaaggagctgggctcccagatcctgaaggagcaccccgtggagaacacccagctgcagaacgagaagctgtacctgtactacctgcagaacggccgggacatgtacgtggaccaggagctggacatcaaccggctgtccgactacgacgtggaccacatcgtgccccagtccttcctgaaggacgactccatcgacaacaaggtgctgacccggtccgacaagaaccggggcaagtccgacaacgtgccctccgaggaggtggtgaagaagatgaagaactactggcggcagctgctgaacgccaagctgatcacccagcggaagttcgacaacctgaccaaggccgagcggggcggcctgtccgagctggacaaggccggcttcatcaagcggcagctggtggagacccggcagatcaccaagcacgtggcccagatcctggactcccggatgaacaccaagtacgacgagaacgacaagctgatccgggaggtgaaggtgatcaccctgaagtccaagctggtgtccgacttccggaaggacttccagttctacaaggtgcgggagatcaacaactaccaccacgcccacgacgcctacctgaacgccgtggtgggcaccgccctgatcaagaagtaccccaagctggagtccgagttcgtgtacggcgactacaaggtgtacgacgtgcggaagatgatcgccaagtccgagcaggagatcggcaaggccaccgccaagtacttcttctactccaacatcatgaacttcttcaagaccgagatcaccctggccaacggcgagatccggaagcggcccctgatcgagaccaacggcgagaccggcgagatcgtgtgggacaagggccgggacttcgccaccgtgcggaaggtgctgtccatgccccaggtgaacatcgtgaagaagaccgaggtgcagaccggcggcttctccaaggagtccatcctgcccaagcggaactccgacaagctgatcgcccggaagaaggactgggaccccaagaagtacggcggcttcgactcccccaccgtggcctactccgtgctggtggtggccaaggtggagaagggcaagtccaagaagctgaagtccgtgaaggagctgctgggcatcaccatcatggagcggtcctccttcgagaagaaccccatcgacttcctggaggccaagggctacaaggaggtgaagaaggacctgatcatcaagctgcccaagtactccctgttcgagctggagaacggccggaagcggatgctggcctccgccggcgagctgcagaagggcaacgagctggccctgccctccaagtacgtgaacttcctgtacctggcctcccactacgagaagctgaagggctcccccgaggacaacgagcagaagcagctgttcgtggagcagcacaagcactacctggacgagatcatcgagcagatctccgagttctccaagcgggtgatcctggccgacgccaacctggacaaggtgctgtccgcctacaacaagcaccgggacaagcccatccgggagcaggccgagaacatcatccacctgttcaccctgaccaacctgggcgcccccgccgccttcaagtacttcgacaccaccatcgaccggaagcggtacacctccaccaaggaggtgctggacgccaccctgatccaccagtccatcaccggcctgtacgagacccggatcgacctgtcccagctgggcggcgactga

SEQ ID NO: 829-830 - skipped (2 entries)

SEQ ID NO: 831 - protein, 1334 aa, synthetic construct
  REGION 1..1334: note = Synthetic
MDGSGGGSPKKKRKVEDKRPAATKKAGQAKKKKGGSGGGEASPASGPRHLMDPHIFTSNFNNGIGRHKTYLCYEVERLDNGTSVKMDQHRGFLHNQAKNLLCGFYGRHAELRFLDLVPSLQLDPAQIYRVTWFISWSPCFSWGCAGEVRAFLQENTHVRLRIFAARIYDYDPLYKEALQMLRDAGAQVSIMTYDEFKHCWDTFVDHQGCPFQPWDGLDEHSQALSGRLRAILQNQGNSGSETPGTSESATPESAAFKPNPINYILGLAIGIASVGWAMVEIDEEENPIRLIDLGVRVFERAEVPKTGDSLAMARRLARSVRRLTRRRAHRLLRARRLLKREGVLQAADFDENGLIKSLPNTPWQLRAAALDRKLTPLEWSAVLLHLIKHRGYLSQRKNEGETADKELGALLKGVANNAHALQTGDFRTPAELALNKFEKESGHIRNQRGDYSHTFSRKDLQAELILLFEKQKEFGNPHVSGGLKEGIETLLMTQRPALSGDAVQKMLGHCTFEPAEPKAAKNTYTAERFIWLTKLNNLRILEQGSERPLTDTERATLMDEPYRKSKLTYAQARKLLGLEDTAFFKGLRYGKDNAEASTLMEMKAYHAISRALEKEGLKDKKSPLNLSSELQDEIGTAFSLFKTDEDITGRLKDRVQPEILEALLKHISFDKFVQISLKALRRIVPLMEQGKRYDEACAEIYGDHYGKKNTEEKIYLPPIPADEIRNPVVLRALSQARKVINGVVRRYGSPARIHIETAREVGKSFKDRKEIEKRQEENRKDREKAAAKFREYFPNFVGEPKSKDILKLRLYEQQHGKCLYSGKEINLVRLNEKGYVEIDHALPFSRTWDDSFNNKVLVLGSENQNKGNQTPYEYFNGKDNSREWQEFKARVETSRFPRSKKQRILLQKFDEDGFKECNLNDTRYVNRFLCQFVADHILLTGKGKRRVFASNGQITNLLRGFWGLRKVRAENDRHHALDAVVVACSTVAMQQKITRFVRYKEMNAFDGKTIDKETGKVLHQKTHFPQPWEFFAQEVMIRVFGKPDGKPEFEEADTPEKLRTLLAEKLSSRPEAVHEYVTPLFVSRAPNRKMSGAHKDTLRSAKRFVKHNEKISVKRVWLTEIKLADLENMVNYKNGREIELYEALKARLEAYGGNAKQAFDPKDNPFYKKGGQLVKAVRVEKTQESGVLLNKKNAYTIADNGDMVRVDVFCKVDKKGKNQYFIVPIYAWQVAENILPDIDCKGYRIDDSYTFCFSLHKYDLIAFQKDEKSKVEFAYYINCDSSNGRFYLAWHDKGSKEQQFRISTQNLVLIQKYQVNELGKEIRPCRLKKRPPVR

SEQ ID NO: 832 - protein, 1082 aa, synthetic construct
  REGION 1..1082: note = Synthetic
MAAFKPNPINYILGLDIGIASVGWAMVEIDEEENPIRLIDLGVRVFERAEVPKTGDSLAMARRLARSVRRLTRRRAHRLLRARRLLKREGVLQAADFDENGLIKSLPNTPWQLRAAALDRKLTPLEWSAVLLHLIKHRGYLSQRKNEGETADKELGALLKGVANNAHALQTGDFRTPAELALNKFEKESGHIRNQRGDYSHTFSRKDLQAELILLFEKQKEFGNPHVSGGLKEGIETLLMTQRPALSGDAVQKMLGHCTFEPAEPKAAKNTYTAERFIWLTKLNNLRILEQGSERPLTDTERATLMDEPYRKSKLTYAQARKLLGLEDTAFFKGLRYGKDNAEASTLMEMKAYHAISRALEKEGLKDKKSPLNLSSELQDEIGTAFSLFKTDEDITGRLKDRVQPEILEALLKHISFDKFVQISLKALRRIVPLMEQGKRYDEACAEIYGDHYGKKNTEEKIYLPPIPADEIRNPVVLRALSQARKVINGVVRRYGSPARIHIETAREVGKSFKDRKEIEKRQEENRKDREKAAAKFREYFPNFVGEPKSKDILKLRLYEQQHGKCLYSGKEINLVRLNEKGYVEIDHALPFSRTWDDSFNNKVLVLGSENQNKGNQTPYEYFNGKDNSREWQEFKARVETSRFPRSKKQRILLQKFDEDGFKECNLNDTRYVNRFLCQFVADHILLTGKGKRRVFASNGQITNLLRGFWGLRKVRAENDRHHALDAVVVACSTVAMQQKITRFVRYKEMNAFDGKTIDKETGKVLHQKTHFPQPWEFFAQEVMIRVFGKPDGKPEFEEADTPEKLRTLLAEKLSSRPEAVHEYVTPLFVSRAPNRKMSGAHKDTLRSAKRFVKHNEKISVKRVWLTEIKLADLENMVNYKNGREIELYEALKARLEAYGGNAKQAFDPKDNPFYKKGGQLVKAVRVEKTQESGVLLNKKNAYTIADNGDMVRVDVFCKVDKKGKNQYFIVPIYAWQVAENILPDIDCKGYRIDDSYTFCFSLHKYDLIAFQKDEKSKVEFAYYINCDSSNGRFYLAWHDKGSKEQQFRISTQNLVLIQKYQVNELGKEIRPCRLKKRPPVR

SEQ ID NO: 833 - protein, 1139 aa, synthetic construct
  REGION 1..1139: note = Synthetic
MDGSGGGSPKKKRKVEDKRPAATKKAGQAKKKKGGSGGGAAFKPNPINYILGLDIGIASVGWAMVEIDEEENPIRLIDLGVRVFERAEVPKTGDSLAMARRLARSVRRLTRRRAHRLLRARRLLKREGVLQAADFDENGLIKSLPNTPWQLRAAALDRKLTPLEWSAVLLHLIKHRGYLSQRKNEGETADKELGALLKGVANNAHALQTGDFRTPAELALNKFEKESGHIRNQRGDYSHTFSRKDLQAELILLFEKQKEFGNPHVSGGLKEGIETLLMTQRPALSGDAVQKMLGHCTFEPAEPKAAKNTYTAERFIWLTKLNNLRILEQGSERPLTDTERATLMDEPYRKSKLTYAQARKLLGLEDTAFFKGLRYGKDNAEASTLMEMKAYHAISRALEKEGLKDKKSPLNLSSELQDEIGTAFSLFKTDEDITGRLKDRVQPEILEALLKHISFDKFVQISLKALRRIVPLMEQGKRYDEACAEIYGDHYGKKNTEEKIYLPPIPADEIRNPVVLRALSQARKVINGVVRRYGSPARIHIETAREVGKSFKDRKEIEKRQEENRKDREKAAAKFREYFPNFVGEPKSKDILKLRLYEQQHGKCLYSGKEINLVRLNEKGYVEIDHALPFSRTWDDSFNNKVLVLGSENQNKGNQTPYEYFNGKDNSREWQEFKARVETSRFPRSKKQRILLQKFDEDGFKECNLNDTRYVNRFLCQFVADHILLTGKGKRRVFASNGQITNLLRGFWGLRKVRAENDRHHALDAVVVACSTVAMQQKITRFVRYKEMNAFDGKTIDKETGKVLHQKTHFPQPWEFFAQEVMIRVFGKPDGKPEFEEADTPEKLRTLLAEKLSSRPEAVHEYVTPLFVSRAPNRKMSGAHKDTLRSAKRFVKHNEKISVKRVWLTEIKLADLENMVNYKNGREIELYEALKARLEAYGGNAKQAFDPKDNPFYKKGGQLVKAVRVEKTQESGVLLNKKNAYTIADNGDMVRVDVFCKVDKKGKNQYFIVPIYAWQVAENILPDIDCKGYRIDDSYTFCFSLHKYDLIAFQKDEKSKVEFAYYINCDSSNGRFYLAWHDKGSKEQQFRISTQNLVLIQKYQVNELGKEIRPCRLKKRPPVRSESATPESVSGWRLFKKIS

SEQ ID NO: 834 - protein, 1082 aa, synthetic construct
  REGION 1..1082: note = Synthetic
MAAFKPNPINYILGLAIGIASVGWAMVEIDEEENPIRLIDLGVRVFERAEVPKTGDSLAMARRLARSVRRLTRRRAHRLLRARRLLKREGVLQAADFDENGLIKSLPNTPWQLRAAALDRKLTPLEWSAVLLHLIKHRGYLSQRKNEGETADKELGALLKGVANNAHALQTGDFRTPAELALNKFEKESGHIRNQRGDYSHTFSRKDLQAELILLFEKQKEFGNPHVSGGLKEGIETLLMTQRPALSGDAVQKMLGHCTFEPAEPKAAKNTYTAERFIWLTKLNNLRILEQGSERPLTDTERATLMDEPYRKSKLTYAQARKLLGLEDTAFFKGLRYGKDNAEASTLMEMKAYHAISRALEKEGLKDKKSPLNLSSELQDEIGTAFSLFKTDEDITGRLKDRVQPEILEALLKHISFDKFVQISLKALRRIVPLMEQGKRYDEACAEIYGDHYGKKNTEEKIYLPPIPADEIRNPVVLRALSQARKVINGVVRRYGSPARIHIETAREVGKSFKDRKEIEKRQEENRKDREKAAAKFREYFPNFVGEPKSKDILKLRLYEQQHGKCLYSGKEINLVRLNEKGYVEIDHALPFSRTWDDSFNNKVLVLGSENQNKGNQTPYEYFNGKDNSREWQEFKARVETSRFPRSKKQRILLQKFDEDGFKECNLNDTRYVNRFLCQFVADHILLTGKGKRRVFASNGQITNLLRGFWGLRKVRAENDRHHALDAVVVACSTVAMQQKITRFVRYKEMNAFDGKTIDKETGKVLHQKTHFPQPWEFFAQEVMIRVFGKPDGKPEFEEADTPEKLRTLLAEKLSSRPEAVHEYVTPLFVSRAPNRKMSGAHKDTLRSAKRFVKHNEKISVKRVWLTEIKLADLENMVNYKNGREIELYEALKARLEAYGGNAKQAFDPKDNPFYKKGGQLVKAVRVEKTQESGVLLNKKNAYTIADNGDMVRVDVFCKVDKKGKNQYFIVPIYAWQVAENILPDIDCKGYRIDDSYTFCFSLHKYDLIAFQKDEKSKVEFAYYINCDSSNGRFYLAWHDKGSKEQQFRISTQNLVLIQKYQVNELGKEIRPCRLKKRPPVR

SEQ ID NO: 835 - protein, 1334 aa, synthetic construct
  REGION 1..1334: note = Synthetic
MDGSGGGSPKKKRKVEDKRPAATKKAGQAKKKKGGSGGGEASPASGPRHLMDPHIFTSNFNNGIGRHKTYLCYEVERLDNGTSVKMDQHRGFLHNQAKNLLCGFYGRHAELRFLDLVPSLQLDPAQIYRVTWFISWSPCFSWGCAGEVRAFLQENTHVRLRIFAARIYDYDPLYKEALQMLRDAGAQVSIMTYDEFKHCWDTFVDHQGCPFQPWDGLDEHSQALSGRLRAILQNQGNGTKDSTKDIPETPSKDAAFKPNPINYILGLAIGIASVGWAMVEIDEEENPIRLIDLGVRVFERAEVPKTGDSLAMARRLARSVRRLTRRRAHRLLRARRLLKREGVLQAADFDENGLIKSLPNTPWQLRAAALDRKLTPLEWSAVLLHLIKHRGYLSQRKNEGETADKELGALLKGVANNAHALQTGDFRTPAELALNKFEKESGHIRNQRGDYSHTFSRKDLQAELILLFEKQKEFGNPHVSGGLKEGIETLLMTQRPALSGDAVQKMLGHCTFEPAEPKAAKNTYTAERFIWLTKLNNLRILEQGSERPLTDTERATLMDEPYRKSKLTYAQARKLLGLEDTAFFKGLRYGKDNAEASTLMEMKAYHAISRALEKEGLKDKKSPLNLSSELQDEIGTAFSLFKTDEDITGRLKDRVQPEILEALLKHISFDKFVQISLKALRRIVPLMEQGKRYDEACAEIYGDHYGKKNTEEKIYLPPIPADEIRNPVVLRALSQARKVINGVVRRYGSPARIHIETAREVGKSFKDRKEIEKRQEENRKDREKAAAKFREYFPNFVGEPKSKDILKLRLYEQQHGKCLYSGKEINLVRLNEKGYVEIDHALPFSRTWDDSFNNKVLVLGSENQNKGNQTPYEYFNGKDNSREWQEFKARVETSRFPRSKKQRILLQKFDEDGFKECNLNDTRYVNRFLCQFVADHILLTGKGKRRVFASNGQITNLLRGFWGLRKVRAENDRHHALDAVVVACSTVAMQQKITRFVRYKEMNAFDGKTIDKETGKVLHQKTHFPQPWEFFAQEVMIRVFGKPDGKPEFEEADTPEKLRTLLAEKLSSRPEAVHEYVTPLFVSRAPNRKMSGAHKDTLRSAKRFVKHNEKISVKRVWLTEIKLADLENMVNYKNGREIELYEALKARLEAYGGNAKQAFDPKDNPFYKKGGQLVKAVRVEKTQESGVLLNKKNAYTIADNGDMVRVDVFCKVDKKGKNQYFIVPIYAWQVAENILPDIDCKGYRIDDSYTFCFSLHKYDLIAFQKDEKSKVEFAYYINCDSSNGRFYLAWHDKGSKEQQFRISTQNLVLIQKYQVNELGKEIRPCRLKKRPPVR

SEQ ID NO: 836 - protein, 1317 aa, synthetic construct
  REGION 1..1317: note = Synthetic
MEASPASGPRHLMDPHIFTSNFNNGIGRHKTYLCYEVERLDNGTSVKMDQHRGFLHNQAKNLLCGFYGRHAELRFLDLVPSLQLDPAQIYRVTWFISWSPCFSWGCAGEVRAFLQENTHVRLRIFAARIYDYDPLYKEALQMLRDAGAQVSIMTYDEFKHCWDTFVDHQGCPFQPWDGLDEHSQALSGRLRAILQNQGNSGSETPGTSESATPESAAFKPNPINYILGLAIGIASVGWAMVEIDEEENPIRLIDLGVRVFERAEVPKTGDSLAMARRLARSVRRLTRRRAHRLLRARRLLKREGVLQAADFDENGLIKSLPNTPWQLRAAALDRKLTPLEWSAVLLHLIKHRGYLSQRKNEGETADKELGALLKGVANNAHALQTGDFRTPAELALNKFEKESGHIRNQRGDYSHTFSRKDLQAELILLFEKQKEFGNPHVSGGLKEGIETLLMTQRPALSGDAVQKMLGHCTFEPAEPKAAKNTYTAERFIWLTKLNNLRILEQGSERPLTDTERATLMDEPYRKSKLTYAQARKLLGLEDTAFFKGLRYGKDNAEASTLMEMKAYHAISRALEKEGLKDKKSPLNLSSELQDEIGTAFSLFKTDEDITGRLKDRVQPEILEALLKHISFDKFVQISLKALRRIVPLMEQGKRYDEACAEIYGDHYGKKNTEEKIYLPPIPADEIRNPVVLRALSQARKVINGVVRRYGSPARIHIETAREVGKSFKDRKEIEKRQEENRKDREKAAAKFREYFPNFVGEPKSKDILKLRLYEQQHGKCLYSGKEINLVRLNEKGYVEIDHALPFSRTWDDSFNNKVLVLGSENQNKGNQTPYEYFNGKDNSREWQEFKARVETSRFPRSKKQRILLQKFDEDGFKECNLNDTRYVNRFLCQFVADHILLTGKGKRRVFASNGQITNLLRGFWGLRKVRAENDRHHALDAVVVACSTVAMQQKITRFVRYKEMNAFDGKTIDKETGKVLHQKTHFPQPWEFFAQEVMIRVFGKPDGKPEFEEADTPEKLRTLLAEKLSSRPEAVHEYVTPLFVSRAPNRKMSGAHKDTLRSAKRFVKHNEKISVKRVWLTEIKLADLENMVNYKNGREIELYEALKARLEAYGGNAKQAFDPKDNPFYKKGGQLVKAVRVEKTQESGVLLNKKNAYTIADNGDMVRVDVFCKVDKKGKNQYFIVPIYAWQVAENILPDIDCKGYRIDDSYTFCFSLHKYDLIAFQKDEKSKVEFAYYINCDSSNGRFYLAWHDKGSKEQQFRISTQNLVLIQKYQVNELGKEIRPCRLKKRPPVRSGKRTADGSEFESPKKKRKVE

SEQ ID NO: 837 - protein, 1355 aa, synthetic construct
  REGION 1..1355: note = Synthetic
MDGSGGGSPKKKRKVEDKRPAATKKAGQAKKKKGGSGGGEASPASGPRHLMDPHIFTSNFNNGIGRHKTYLCYEVERLDNGTSVKMDQHRGFLHNQAKNLLCGFYGRHAELRFLDLVPSLQLDPAQIYRVTWFISWSPCFSWGCAGEVRAFLQENTHVRLRIFAARIYDYDPLYKEALQMLRDAGAQVSIMTYDEFKHCWDTFVDHQGCPFQPWDGLDEHSQALSGRLRAILQNQGNSGSETPGTSESATPESAAFKPNPINYILGLAIGIASVGWAMVEIDEEENPIRLIDLGVRVFERAEVPKTGDSLAMARRLARSVRRLTRRRAHRLLRARRLLKREGVLQAADFDENGLIKSLPNTPWQLRAAALDRKLTPLEWSAVLLHLIKHRGYLSQRKNEGETADKELGALLKGVANNAHALQTGDFRTPAELALNKFEKESGHIRNQRGDYSHTFSRKDLQAELILLFEKQKEFGNPHVSGGLKEGIETLLMTQRPALSGDAVQKMLGHCTFEPAEPKAAKNTYTAERFIWLTKLNNLRILEQGSERPLTDTERATLMDEPYRKSKLTYAQARKLLGLEDTAFFKGLRYGKDNAEASTLMEMKAYHAISRALEKEGLKDKKSPLNLSSELQDEIGTAFSLFKTDEDITGRLKDRVQPEILEALLKHISFDKFVQISLKALRRIVPLMEQGKRYDEACAEIYGDHYGKKNTEEKIYLPPIPADEIRNPVVLRALSQARKVINGVVRRYGSPARIHIETAREVGKSFKDRKEIEKRQEENRKDREKAAAKFREYFPNFVGEPKSKDILKLRLYEQQHGKCLYSGKEINLVRLNEKGYVEIDHALPFSRTWDDSFNNKVLVLGSENQNKGNQTPYEYFNGKDNSREWQEFKARVETSRFPRSKKQRILLQKFDEDGFKECNLNDTRYVNRFLCQFVADHILLTGKGKRRVFASNGQITNLLRGFWGLRKVRAENDRHHALDAVVVACSTVAMQQKITRFVRYKEMNAFDGKTIDKETGKVLHQKTHFPQPWEFFAQEVMIRVFGKPDGKPEFEEADTPEKLRTLLAEKLSSRPEAVHEYVTPLFVSRAPNRKMSGAHKDTLRSAKRFVKHNEKISVKRVWLTEIKLADLENMVNYKNGREIELYEALKARLEAYGGNAKQAFDPKDNPFYKKGGQLVKAVRVEKTQESGVLLNKKNAYTIADNGDMVRVDVFCKVDKKGKNQYFIVPIYAWQVAENILPDIDCKGYRIDDSYTFCFSLHKYDLIAFQKDEKSKVEFAYYINCDSSNGRFYLAWHDKGSKEQQFRISTQNLVLIQKYQVNELGKEIRPCRLKKRPPVRSGKRTADGSEFESPKKKRKVE

SEQ ID NO: 838 - protein, 1393 aa, synthetic construct
  REGION 1..1393: note = Synthetic
MDGSGGGSPKKKRKVEDKRPAATKKAGQAKKKKGGSGGGEASPASGPRHLMDPHIFTSNFNNGIGRHKTYLCYEVERLDNGTSVKMDQHRGFLHNQAKNLLCGFYGRHAELRFLDLVPSLQLDPAQIYRVTWFISWSPCFSWGCAGEVRAFLQENTHVRLRIFAARIYDYDPLYKEALQMLRDAGAQVSIMTYDEFKHCWDTFVDHQGCPFQPWDGLDEHSQALSGRLRAILQNQGNSGSETPGTSESATPESAAFKPNPINYILGLAIGIASVGWAMVEIDEEENPIRLIDLGVRVFERAEVPKTGDSLAMARRLARSVRRLTRRRAHRLLRARRLLKREGVLQAADFDENGLIKSLPNTPWQLRAAALDRKLTPLEWSAVLLHLIKHRGYLSQRKNEGETADKELGALLKGVANNAHALQTGDFRTPAELALNKFEKESGHIRNQRGDYSHTFSRKDLQAELILLFEKQKEFGNPHVSGGLKEGIETLLMTQRPALSGDAVQKMLGHCTFEPAEPKAAKNTYTAERFIWLTKLNNLRILEQGSERPLTDTERATLMDEPYRKSKLTYAQARKLLGLEDTAFFKGLRYGKDNAEASTLMEMKAYHAISRALEKEGLKDKKSPLNLSSELQDEIGTAFSLFKTDEDITGRLKDRVQPEILEALLKHISFDKFVQISLKALRRIVPLMEQGKRYDEACAEIYGDHYGKKNTEEKIYLPPIPADEIRNPVVLRALSQARKVINGVVRRYGSPARIHIETAREVGKSFKDRKEIEKRQEENRKDREKAAAKFREYFPNFVGEPKSKDILKLRLYEQQHGKCLYSGKEINLVRLNEKGYVEIDHALPFSRTWDDSFNNKVLVLGSENQNKGNQTPYEYFNGKDNSREWQEFKARVETSRFPRSKKQRILLQKFDEDGFKECNLNDTRYVNRFLCQFVADHILLTGKGKRRVFASNGQITNLLRGFWGLRKVRAENDRHHALDAVVVACSTVAMQQKITRFVRYKEMNAFDGKTIDKETGKVLHQKTHFPQPWEFFAQEVMIRVFGKPDGKPEFEEADTPEKLRTLLAEKLSSRPEAVHEYVTPLFVSRAPNRKMSGAHKDTLRSAKRFVKHNEKISVKRVWLTEIKLADLENMVNYKNGREIELYEALKARLEAYGGNAKQAFDPKDNPFYKKGGQLVKAVRVEKTQESGVLLNKKNAYTIADNGDMVRVDVFCKVDKKGKNQYFIVPIYAWQVAENILPDIDCKGYRIDDSYTFCFSLHKYDLIAFQKDEKSKVEFAYYINCDSSNGRFYLAWHDKGSKEQQFRISTQNLVLIQKYQVNELGKEIRPCRLKKRPPVREDKRPAATKKAGQAKKKKYPYDVPDYAGYPYDVPDYAGSYPYDVPDYAAAPAAKKKKLD

SEQ ID NO: 839-849 - skipped (11 entries)

SEQ ID NO: 850 - protein, 199 aa, synthetic construct
  REGION 1..199: note = Synthetic
MEASPASGPRHLMDPHIFTSNFNNGIGRHKTYLCYEVERLDNGTSVKMDQHRGFLHNQAKNLLCGFYGRHAELRFLDLVPSLQLDPAQIYRVTWFISWSPCFSWGCAGEVRAFLQENTHVRLRIFAARIYDYDPLYKEALQMLRDAGAQVSIMTYDEFKHCWDTFVDHQGCPFQPWDGLDEHSQALSGRLRAILQNQGN

SEQ ID NO: 851 - protein, 1593 aa, synthetic construct
  REGION 1..1593: note = Synthetic
MEASPASGPRHLMDPHIFTSNFNNGIGRHKTYLCYEVERLDNGTSVKMDQHRGFLHNQAKNLLCGFYGRHAELRFLDLVPSLQLDPAQIYRVTWFISWSPCFSWGCAGEVRAFLQENTHVRLRIFAARIYDYDPLYKEALQMLRDAGAQVSIMTYDEFKHCWDTFVDHQGCPFQPWDGLDEHSQALSGRLRAILQNQGNSGSETPGTSESATPESDKKYSIGLAIGTNSVGWAVITDEYKVPSKKFKVLGNTDRHSIKKNLIGALLFDSGETAEATRLKRTARRRYTRRKNRICYLQEIFSNEMAKVDDSFFHRLEESFLVEEDKKHERHPIFGNIVDEVAYHEKYPTIYHLRKKLVDSTDKADLRLIYLALAHMIKFRGHFLIEGDLNPDNSDVDKLFIQLVQTYNQLFEENPINASGVDAKAILSARLSKSRRLENLIAQLPGEKKNGLFGNLIALSLGLTPNFKSNFDLAEDAKLQLSKDTYDDDLDNLLAQIGDQYADLFLAAKNLSDAILLSDILRVNTEITKAPLSASMIKRYDEHHQDLTLLKALVRQQLPEKYKEIFFDQSKNGYAGYIDGGASQEEFYKFIKPILEKMDGTEELLVKLNREDLLRKQRTFDNGSIPHQIHLGELHAILRRQEDFYPFLKDNREKIEKILTFRIPYYVGPLARGNSRFAWMTRKSEETITPWNFEEVVDKGASAQSFIERMTNFDKNLPNEKVLPKHSLLYEYFTVYNELTKVKYVTEGMRKPAFLSGEQKKAIVDLLFKTNRKVTVKQLKEDYFKKIECFDSVEISGVEDRFNASLGTYHDLLKIIKDKDFLDNEENEDILEDIVLTLTLFEDREMIEERLKTYAHLFDDKVMKQLKRRRYTGWGRLSRKLINGIRDKQSGKTILDFLKSDGFANRNFMQLIHDDSLTFKEDIQKAQVSGQGDSLHEHIANLAGSPAIKKGILQTVKVVDELVKVMGRHKPENIVIEMARENQTTQKGQKNSRERMKRIEEGIKELGSQILKEHPVENTQLQNEKLYLYYLQNGRDMYVDQELDINRLSDYDVDHIVPQSFLKDDSIDNKVLTRSDKNRGKSDNVPSEEVVKKMKNYWRQLLNAKLITQRKFDNLTKAERGGLSELDKAGFIKRQLVETRQITKHVAQILDSRMNTKYDENDKLIREVKVITLKSKLVSDFRKDFQFYKVREINNYHHAHDAYLNAVVGTALIKKYPKLESEFVYGDYKVYDVRKMIAKSEQEIGKATAKYFFYSNIMNFFKTEITLANGEIRKRPLIETNGETGEIVWDKGRDFATVRKVLSMPQVNIVKKTEVQTGGFSKESILPKRNSDKLIARKKDWDPKKYGGFDSPTVAYSVLVVAKVEKGKSKKLKSVKELLGITIMERSSFEKNPIDFLEAKGYKEVKKDLIIKLPKYSLFELENGRKRMLASAGELQKGNELALPSKYVNFLYLASHYEKLKGSPEDNEQKQLFVEQHKHYLDEIIEQISEFSKRVILADANLDKVLSAYNKHRDKPIREQAENIIHLFTLTNLGAPAAFKYFDTTIDRKRYTSTKEVLDATLIHQSITGLYETRIDLSQLGGDGGGSPKKKRKV

SEQ ID NO: 852 - protein, 1612 aa, synthetic construct
  REGION 1..1612: note = Synthetic
MEASPASGPRHLMDPHIFTSNFNNGIGRHKTYLCYEVERLDNGTSVKMDQHRGFLHNQAKNLLCGFYGRHAELRFLDLVPSLQLDPAQIYRVTWFISWSPCFSWGCAGEVRAFLQENTHVRLRIFAARIYDYDPLYKEALQMLRDAGAQVSIMTYDEFKHCWDTFVDHQGCPFQPWDGLDEHSQALSGRLRAILQNQGNSGSETPGTSESATPESDKKYSIGLAIGTNSVGWAVITDEYKVPSKKFKVLGNTDRHSIKKNLIGALLFDSGETAEATRLKRTARRRYTRRKNRICYLQEIFSNEMAKVDDSFFHRLEESFLVEEDKKHERHPIFGNIVDEVAYHEKYPTIYHLRKKLVDSTDKADLRLIYLALAHMIKFRGHFLIEGDLNPDNSDVDKLFIQLVQTYNQLFEENPINASGVDAKAILSARLSKSRRLENLIAQLPGEKKNGLFGNLIALSLGLTPNFKSNFDLAEDAKLQLSKDTYDDDLDNLLAQIGDQYADLFLAAKNLSDAILLSDILRVNTEITKAPLSASMIKRYDEHHQDLTLLKALVRQQLPEKYKEIFFDQSKNGYAGYIDGGASQEEFYKFIKPILEKMDGTEELLVKLNREDLLRKQRTFDNGSIPHQIHLGELHAILRRQEDFYPFLKDNREKIEKILTFRIPYYVGPLARGNSRFAWMTRKSEETITPWNFEEVVDKGASAQSFIERMTNFDKNLPNEKVLPKHSLLYEYFTVYNELTKVKYVTEGMRKPAFLSGEQKKAIVDLLFKTNRKVTVKQLKEDYFKKIECFDSVEISGVEDRFNASLGTYHDLLKIIKDKDFLDNEENEDILEDIVLTLTLFEDREMIEERLKTYAHLFDDKVMKQLKRRRYTGWGRLSRKLINGIRDKQSGKTILDFLKSDGFANRNFMQLIHDDSLTFKEDIQKAQVSGQGDSLHEHIANLAGSPAIKKGILQTVKVVDELVKVMGRHKPENIVIEMARENQTTQKGQKNSRERMKRIEEGIKELGSQILKEHPVENTQLQNEKLYLYYLQNGRDMYVDQELDINRLSDYDVDHIVPQSFLKDDSIDNKVLTRSDKNRGKSDNVPSEEVVKKMKNYWRQLLNAKLITQRKFDNLTKAERGGLSELDKAGFIKRQLVETRQITKHVAQILDSRMNTKYDENDKLIREVKVITLKSKLVSDFRKDFQFYKVREINNYHHAHDAYLNAVVGTALIKKYPKLESEFVYGDYKVYDVRKMIAKSEQEIGKATAKYFFYSNIMNFFKTEITLANGEIRKRPLIETNGETGEIVWDKGRDFATVRKVLSMPQVNIVKKTEVQTGGFSKESILPKRNSDKLIARKKDWDPKKYGGFDSPTVAYSVLVVAKVEKGKSKKLKSVKELLGITIMERSSFEKNPIDFLEAKGYKEVKKDLIIKLPKYSLFELENGRKRMLASAGELQKGNELALPSKYVNFLYLASHYEKLKGSPEDNEQKQLFVEQHKHYLDEIIEQISEFSKRVILADANLDKVLSAYNKHRDKPIREQAENIIHLFTLTNLGAPAAFKYFDTTIDRKRYTSTKEVLDATLIHQSITGLYETRIDLSQLGGDGGGSPKKKRKVSESATPESVSGWRLFKKIS

SEQ ID NO: 853 - protein, 1379 aa, synthetic construct
  REGION 1..1379: note = Synthetic
MDKKYSIGLDIGTNSVGWAVITDEYKVPSKKFKVLGNTDRHSIKKNLIGALLFDSGETAEATRLKRTARRRYTRRKNRICYLQEIFSNEMAKVDDSFFHRLEESFLVEEDKKHERHPIFGNIVDEVAYHEKYPTIYHLRKKLVDSTDKADLRLIYLALAHMIKFRGHFLIEGDLNPDNSDVDKLFIQLVQTYNQLFEENPINASGVDAKAILSARLSKSRRLENLIAQLPGEKKNGLFGNLIALSLGLTPNFKSNFDLAEDAKLQLSKDTYDDDLDNLLAQIGDQYADLFLAAKNLSDAILLSDILRVNTEITKAPLSASMIKRYDEHHQDLTLLKALVRQQLPEKYKEIFFDQSKNGYAGYIDGGASQEEFYKFIKPILEKMDGTEELLVKLNREDLLRKQRTFDNGSIPHQIHLGELHAILRRQEDFYPFLKDNREKIEKILTFRIPYYVGPLARGNSRFAWMTRKSEETITPWNFEEVVDKGASAQSFIERMTNFDKNLPNEKVLPKHSLLYEYFTVYNELTKVKYVTEGMRKPAFLSGEQKKAIVDLLFKTNRKVTVKQLKEDYFKKIECFDSVEISGVEDRFNASLGTYHDLLKIIKDKDFLDNEENEDILEDIVLTLTLFEDREMIEERLKTYAHLFDDKVMKQLKRRRYTGWGRLSRKLINGIRDKQSGKTILDFLKSDGFANRNFMQLIHDDSLTFKEDIQKAQVSGQGDSLHEHIANLAGSPAIKKGILQTVKVVDELVKVMGRHKPENIVIEMARENQTTQKGQKNSRERMKRIEEGIKELGSQILKEHPVENTQLQNEKLYLYYLQNGRDMYVDQELDINRLSDYDVDHIVPQSFLKDDSIDNKVLTRSDKNRGKSDNVPSEEVVKKMKNYWRQLLNAKLITQRKFDNLTKAERGGLSELDKAGFIKRQLVETRQITKHVAQILDSRMNTKYDENDKLIREVKVITLKSKLVSDFRKDFQFYKVREINNYHHAHDAYLNAVVGTALIKKYPKLESEFVYGDYKVYDVRKMIAKSEQEIGKATAKYFFYSNIMNFFKTEITLANGEIRKRPLIETNGETGEIVWDKGRDFATVRKVLSMPQVNIVKKTEVQTGGFSKESILPKRNSDKLIARKKDWDPKKYGGFDSPTVAYSVLVVAKVEKGKSKKLKSVKELLGITIMERSSFEKNPIDFLEAKGYKEVKKDLIIKLPKYSLFELENGRKRMLASAGELQKGNELALPSKYVNFLYLASHYEKLKGSPEDNEQKQLFVEQHKHYLDEIIEQISEFSKRVILADANLDKVLSAYNKHRDKPIREQAENIIHLFTLTNLGAPAAFKYFDTTIDRKRYTSTKEVLDATLIHQSITGLYETRIDLSQLGGDGGGSPKKKRKV

SEQ ID NO: 854 - protein, 1398 aa, synthetic construct
  REGION 1..1398: note = Synthetic
MDKKYSIGLDIGTNSVGWAVITDEYKVPSKKFKVLGNTDRHSIKKNLIGALLFDSGETAEATRLKRTARRRYTRRKNRICYLQEIFSNEMAKVDDSFFHRLEESFLVEEDKKHERHPIFGNIVDEVAYHEKYPTIYHLRKKLVDSTDKADLRLIYLALAHMIKFRGHFLIEGDLNPDNSDVDKLFIQLVQTYNQLFEENPINASGVDAKAILSARLSKSRRLENLIAQLPGEKKNGLFGNLIALSLGLTPNFKSNFDLAEDAKLQLSKDTYDDDLDNLLAQIGDQYADLFLAAKNLSDAILLSDILRVNTEITKAPLSASMIKRYDEHHQDLTLLKALVRQQLPEKYKEIFFDQSKNGYAGYIDGGASQEEFYKFIKPILEKMDGTEELLVKLNREDLLRKQRTFDNGSIPHQIHLGELHAILRRQEDFYPFLKDNREKIEKILTFRIPYYVGPLARGNSRFAWMTRKSEETITPWNFEEVVDKGASAQSFIERMTNFDKNLPNEKVLPKHSLLYEYFTVYNELTKVKYVTEGMRKPAFLSGEQKKAIVDLLFKTNRKVTVKQLKEDYFKKIECFDSVEISGVEDRFNASLGTYHDLLKIIKDKDFLDNEENEDILEDIVLTLTLFEDREMIEERLKTYAHLFDDKVMKQLKRRRYTGWGRLSRKLINGIRDKQSGKTILDFLKSDGFANRNFMQLIHDDSLTFKEDIQKAQVSGQGDSLHEHIANLAGSPAIKKGILQTVKVVDELVKVMGRHKPENIVIEMARENQTTQKGQKNSRERMKRIEEGIKELGSQILKEHPVENTQLQNEKLYLYYLQNGRDMYVDQELDINRLSDYDVDHIVPQSFLKDDSIDNKVLTRSDKNRGKSDNVPSEEVVKKMKNYWRQLLNAKLITQRKFDNLTKAERGGLSELDKAGFIKRQLVETRQITKHVAQILDSRMNTKYDENDKLIREVKVITLKSKLVSDFRKDFQFYKVREINNYHHAHDAYLNAVVGTALIKKYPKLESEFVYGDYKVYDVRKMIAKSEQEIGKATAKYFFYSNIMNFFKTEITLANGEIRKRPLIETNGETGEIVWDKGRDFATVRKVLSMPQVNIVKKTEVQTGGFSKESILPKRNSDKLIARKKDWDPKKYGGFDSPTVAYSVLVVAKVEKGKSKKLKSVKELLGITIMERSSFEKNPIDFLEAKGYKEVKKDLIIKLPKYSLFELENGRKRMLASAGELQKGNELALPSKYVNFLYLASHYEKLKGSPEDNEQKQLFVEQHKHYLDEIIEQISEFSKRVILADANLDKVLSAYNKHRDKPIREQAENIIHLFTLTNLGAPAAFKYFDTTIDRKRYTSTKEVLDATLIHQSITGLYETRIDLSQLGGDGGGSPKKKRKVSESATPESVSGWRLFKKIS

SEQ ID NO: 855 - protein, 1379 aa, synthetic construct
  REGION 1..1379: note = Synthetic
MDKKYSIGLAIGTNSVGWAVITDEYKVPSKKFKVLGNTDRHSIKKNLIGALLFDSGETAEATRLKRTARRRYTRRKNRICYLQEIFSNEMAKVDDSFFHRLEESFLVEEDKKHERHPIFGNIVDEVAYHEKYPTIYHLRKKLVDSTDKADLRLIYLALAHMIKFRGHFLIEGDLNPDNSDVDKLFIQLVQTYNQLFEENPINASGVDAKAILSARLSKSRRLENLIAQLPGEKKNGLFGNLIALSLGLTPNFKSNFDLAEDAKLQLSKDTYDDDLDNLLAQIGDQYADLFLAAKNLSDAILLSDILRVNTEITKAPLSASMIKRYDEHHQDLTLLKALVRQQLPEKYKEIFFDQSKNGYAGYIDGGASQEEFYKFIKPILEKMDGTEELLVKLNREDLLRKQRTFDNGSIPHQIHLGELHAILRRQEDFYPFLKDNREKIEKILTFRIPYYVGPLARGNSRFAWMTRKSEETITPWNFEEVVDKGASAQSFIERMTNFDKNLPNEKVLPKHSLLYEYFTVYNELTKVKYVTEGMRKPAFLSGEQKKAIVDLLFKTNRKVTVKQLKEDYFKKIECFDSVEISGVEDRFNASLGTYHDLLKIIKDKDFLDNEENEDILEDIVLTLTLFEDREMIEERLKTYAHLFDDKVMKQLKRRRYTGWGRLSRKLINGIRDKQSGKTILDFLKSDGFANRNFMQLIHDDSLTFKEDIQKAQVSGQGDSLHEHIANLAGSPAIKKGILQTVKVVDELVKVMGRHKPENIVIEMARENQTTQKGQKNSRERMKRIEEGIKELGSQILKEHPVENTQLQNEKLYLYYLQNGRDMYVDQELDINRLSDYDVDHIVPQSFLKDDSIDNKVLTRSDKNRGKSDNVPSEEVVKKMKNYWRQLLNAKLITQRKFDNLTKAERGGLSELDKAGFIKRQLVETRQITKHVAQILDSRMNTKYDENDKLIREVKVITLKSKLVSDFRKDFQFYKVREINNYHHAHDAYLNAVVGTALIKKYPKLESEFVYGDYKVYDVRKMIAKSEQEIGKATAKYFFYSNIMNFFKTEITLANGEIRKRPLIETNGETGEIVWDKGRDFATVRKVLSMPQVNIVKKTEVQTGGFSKESILPKRNSDKLIARKKDWDPKKYGGFDSPTVAYSVLVVAKVEKGKSKKLKSVKELLGITIMERSSFEKNPIDFLEAKGYKEVKKDLIIKLPKYSLFELENGRKRMLASAGELQKGNELALPSKYVNFLYLASHYEKLKGSPEDNEQKQLFVEQHKHYLDEIIEQISEFSKRVILADANLDKVLSAYNKHRDKPIREQAENIIHLFTLTNLGAPAAFKYFDTTIDRKRYTSTKEVLDATLIHQSITGLYETRIDLSQLGGDGGGSPKKKRKV

SEQ ID NO: 856 - protein, 1368 aa, synthetic construct
  REGION 1..1368: note = Synthetic
MDKKYSIGLAIGTNSVGWAVITDEYKVPSKKFKVLGNTDRHSIKKNLIGALLFDSGETAEATRLKRTARRRYTRRKNRICYLQEIFSNEMAKVDDSFFHRLEESFLVEEDKKHERHPIFGNIVDEVAYHEKYPTIYHLRKKLVDSTDKADLRLIYLALAHMIKFRGHFLIEGDLNPDNSDVDKLFIQLVQTYNQLFEENPINASGVDAKAILSARLSKSRRLENLIAQLPGEKKNGLFGNLIALSLGLTPNFKSNFDLAEDAKLQLSKDTYDDDLDNLLAQIGDQYADLFLAAKNLSDAILLSDILRVNTEITKAPLSASMIKRYDEHHQDLTLLKALVRQQLPEKYKEIFFDQSKNGYAGYIDGGASQEEFYKFIKPILEKMDGTEELLVKLNREDLLRKQRTFDNGSIPHQIHLGELHAILRRQEDFYPFLKDNREKIEKILTFRIPYYVGPLARGNSRFAWMTRKSEETITPWNFEEVVDKGASAQSFIERMTNFDKNLPNEKVLPKHSLLYEYFTVYNELTKVKYVTEGMRKPAFLSGEQKKAIVDLLFKTNRKVTVKQLKEDYFKKIECFDSVEISGVEDRFNASLGTYHDLLKIIKDKDFLDNEENEDILEDIVLTLTLFEDREMIEERLKTYAHLFDDKVMKQLKRRRYTGWGRLSRKLINGIRDKQSGKTILDFLKSDGFANRNFMQLIHDDSLTFKEDIQKAQVSGQGDSLHEHIANLAGSPAIKKGILQTVKVVDELVKVMGRHKPENIVIEMARENQTTQKGQKNSRERMKRIEEGIKELGSQILKEHPVENTQLQNEKLYLYYLQNGRDMYVDQELDINRLSDYDVDHIVPQSFLKDDSIDNKVLTRSDKNRGKSDNVPSEEVVKKMKNYWRQLLNAKLITQRKFDNLTKAERGGLSELDKAGFIKRQLVETRQITKHVAQILDSRMNTKYDENDKLIREVKVITLKSKLVSDFRKDFQFYKVREINNYHHAHDAYLNAVVGTALIKKYPKLESEFVYGDYKVYDVRKMIAKSEQEIGKATAKYFFYSNIMNFFKTEITLANGEIRKRPLIETNGETGEIVWDKGRDFATVRKVLSMPQVNIVKKTEVQTGGFSKESILPKRNSDKLIARKKDWDPKKYGGFDSPTVAYSVLVVAKVEKGKSKKLKSVKELLGITIMERSSFEKNPIDFLEAKGYKEVKKDLIIKLPKYSLFELENGRKRMLASAGELQKGNELALPSKYVNFLYLASHYEKLKGSPEDNEQKQLFVEQHKHYLDEIIEQISEFSKRVILADANLDKVLSAYNKHRDKPIREQAENIIHLFTLTNLGAPAAFKYFDTTIDRKRYTSTKEVLDATLIHQSITGLYETRIDLSQLGGD

SEQ ID NO: 857 - protein, 1391 aa, synthetic construct
  REGION 1..1391: note = Synthetic
DKKYSIGLAIGTNSVGWAVITDEYKVPSKKFKVLGNTDRHSIKKNLIGALLFDSGETAEATRLKRTARRRYTRRKNRICYLQEIFSNEMAKVDDSFFHRLEESFLVEEDKKHERHPIFGNIVDEVAYHEKYPTIYHLRKKLVDSTDKADLRLIYLALAHMIKFRGHFLIEGDLNPDNSDVDKLFIQLVQTYNQLFEENPINASGVDAKAILSARLSKSRRLENLIAQLPGEKKNGLFGNLIALSLGLTPNFKSNFDLAEDAKLQLSKDTYDDDLDNLLAQIGDQYADLFLAAKNLSDAILLSDILRVNTEITKAPLSASMIKRYDEHHQDLTLLKALVRQQLPEKYKEIFFDQSKNGYAGYIDGGASQEEFYKFIKPILEKMDGTEELLVKLNREDLLRKQRTFDNGSIPHQIHLGELHAILRRQEDFYPFLKDNREKIEKILTFRIPYYVGPLARGNSRFAWMTRKSEETITPWNFEEVVDKGASAQSFIERMTNFDKNLPNEKVLPKHSLLYEYFTVYNELTKVKYVTEGMRKPAFLSGEQKKAIVDLLFKTNRKVTVKQLKEDYFKKIECFDSVEISGVEDRFNASLGTYHDLLKIIKDKDFLDNEENEDILEDIVLTLTLFEDREMIEERLKTYAHLFDDKVMKQLKRRRYTGWGRLSRKLINGIRDKQSGKTILDFLKSDGFANRNFMQLIHDDSLTFKEDIQKAQVSGQGDSLHEHIANLAGSPAIKKGILQTVKVVDELVKVMGRHKPENIVIEMARENQTTQKGQKNSRERMKRIEEGIKELGSQILKEHPVENTQLQNEKLYLYYLQNGRDMYVDQELDINRLSDYDVDHIVPQSFLKDDSIDNKVLTRSDKNRGKSDNVPSEEVVKKMKNYWRQLLNAKLITQRKFDNLTKAERGGLSELDKAGFIKRQLVETRQITKHVAQILDSRMNTKYDENDKLIREVKVITLKSKLVSDFRKDFQFYKVREINNYHHAHDAYLNAVVGTALIKKYPKLESEFVYGDYKVYDVRKMIAKSEQEIGKATAKYFFYSNIMNFFKTEITLANGEIRKRPLIETNGETGEIVWDKGRDFATVRKVLSMPQVNIVKKTEVQTGGFSKESILPKRNSDKLIARKKDWDPKKYGGFDSPTVAYSVLVVAKVEKGKSKKLKSVKELLGITIMERSSFEKNPIDFLEAKGYKEVKKDLIIKLPKYSLFELENGRKRMLASAGELQKGNELALPSKYVNFLYLASHYEKLKGSPEDNEQKQLFVEQHKHYLDEIIEQISEFSKRVILADANLDKVLSAYNKHRDKPIREQAENIIHLFTLTNLGAPAAFKYFDTTIDRKRYTSTKEVLDATLIHQSITGLYETRIDLSQLGGDGSGSPKKKRKVDGSPKKKRKVDSG

SEQ ID NO: 858 - protein, 1593 aa, synthetic construct
  REGION 1..1593: note = Synthetic
MEASPASGPRHLMDPHIFTSNFNNGIGRHKTYLCYEVERLDNGTSVKMDQHRGFLHNQAKNLLCGFYGRHAELRFLDLVPSLQLDPAQIYRVTWFISWSPCFSWGCAGEVRAFLQENTHVRLRIFAARIYDYDPLYKEALQMLRDAGAQVSIMTYDEFKHCWDTFVDHQGCPFQPWDGLDEHSQALSGRLRAILQNQGNGTKDSTKDIPETPSKDDKKYSIGLAIGTNSVGWAVITDEYKVPSKKFKVLGNTDRHSIKKNLIGALLFDSGETAEATRLKRTARRRYTRRKNRICYLQEIFSNEMAKVDDSFFHRLEESFLVEEDKKHERHPIFGNIVDEVAYHEKYPTIYHLRKKLVDSTDKADLRLIYLALAHMIKFRGHFLIEGDLNPDNSDVDKLFIQLVQTYNQLFEENPINASGVDAKAILSARLSKSRRLENLIAQLPGEKKNGLFGNLIALSLGLTPNFKSNFDLAEDAKLQLSKDTYDDDLDNLLAQIGDQYADLFLAAKNLSDAILLSDILRVNTEITKAPLSASMIKRYDEHHQDLTLLKALVRQQLPEKYKEIFFDQSKNGYAGYIDGGASQEEFYKFIKPILEKMDGTEELLVKLNREDLLRKQRTFDNGSIPHQIHLGELHAILRRQEDFYPFLKDNREKIEKILTFRIPYYVGPLARGNSRFAWMTRKSEETITPWNFEEVVDKGASAQSFIERMTNFDKNLPNEKVLPKHSLLYEYFTVYNELTKVKYVTEGMRKPAFLSGEQKKAIVDLLFKTNRKVTVKQLKEDYFKKIECFDSVEISGVEDRFNASLGTYHDLLKIIKDKDFLDNEENEDILEDIVLTLTLFEDREMIEERLKTYAHLFDDKVMKQLKRRRYTGWGRLSRKLINGIRDKQSGKTILDFLKSDGFANRNFMQLIHDDSLTFKEDIQKAQVSGQGDSLHEHIANLAGSPAIKKGILQTVKVVDELVKVMGRHKPENIVIEMARENQTTQKGQKNSRERMKRIEEGIKELGSQILKEHPVENTQLQNEKLYLYYLQNGRDMYVDQELDINRLSDYDVDHIVPQSFLKDDSIDNKVLTRSDKNRGKSDNVPSEEVVKKMKNYWRQLLNAKLITQRKFDNLTKAERGGLSELDKAGFIKRQLVETRQITKHVAQILDSRMNTKYDENDKLIREVKVITLKSKLVSDFRKDFQFYKVREINNYHHAHDAYLNAVVGTALIKKYPKLESEFVYGDYKVYDVRKMIAKSEQEIGKATAKYFFYSNIMNFFKTEITLANGEIRKRPLIETNGETGEIVWDKGRDFATVRKVLSMPQVNIVKKTEVQTGGFSKESILPKRNSDKLIARKKDWDPKKYGGFDSPTVAYSVLVVAKVEKGKSKKLKSVKELLGITIMERSSFEKNPIDFLEAKGYKEVKKDLIIKLPKYSLFELENGRKRMLASAGELQKGNELALPSKYVNFLYLASHYEKLKGSPEDNEQKQLFVEQHKHYLDEIIEQISEFSKRVILADANLDKVLSAYNKHRDKPIREQAENIIHLFTLTNLGAPAAFKYFDTTIDRKRYTSTKEVLDATLIHQSITGLYETRIDLSQLGGDGGGSPKKKRKV

SEQ ID NO: 859 - protein, 107 aa, synthetic construct
  REGION 1..107: note = Synthetic
MTNLSDIIEKETGKQLVIQESILMLPEEVEEVIGNKPESDILVHTAYDESTDENVMLLTSDAPEYKPWALVIQDSNGENKIKMLSGGSKRTADGSEFESPKKKRKVE

SEQ ID NO: 860 - protein, 126 aa, synthetic construct
  REGION 1..126: note = Synthetic
MTNLSDIIEKETGKQLVIQESILMLPEEVEEVIGNKPESDILVHTAYDESTDENVMLLTSDAPEYKPWALVIQDSNGENKIKMLSGGSKRTADGSEFESPKKKRKVESESATPESVSGWRLFKKIS

SEQ ID NO: 861-900 - skipped (40 entries)

SEQ ID NO: 901 - protein, 16 aa, synthetic construct
  REGION 1..16: note = Synthetic
SGSETPGTSESATPES

SEQ ID NO: 902 - protein, 12 aa, synthetic construct
  REGION 1..12: note = Synthetic
SGSETPGTSESA

SEQ ID NO: 903 - protein, 21 aa, synthetic construct
  REGION 1..21: note = Synthetic
SGSETPGTSESATPEGGSGGS

SEQ ID NO: 904 - protein, 15 aa, synthetic construct
  REGION 1..15: note = Synthetic
GGGGSEAAAKEAAAK

SEQ ID NO: 905 - protein, 15 aa, synthetic construct
  REGION 1..15: note = Synthetic
EAAAKGGGGSGGGGS

SEQ ID NO: 906 - protein, 15 aa, synthetic construct
  REGION 1..15: note = Synthetic
EAAAKEAAAKEAAAK

SEQ ID NO: 907 - protein, 20 aa, synthetic construct
  REGION 1..20: note = Synthetic
GGGGSGGGGSGGGGSGGGGS

SEQ ID NO: 908 - protein, 20 aa, synthetic construct
  REGION 1..20: note = Synthetic
GGGGSGGGGSEAAAKEAAAK

SEQ ID NO: 909 - protein, 20 aa, synthetic construct
  REGION 1..20: note = Synthetic
GGGGSEAAAKGGGGSGGGGS

SEQ ID NO: 910 - protein, 25 aa, synthetic construct
  REGION 1..25: note = Synthetic
EAAAKEAAAKEAAAKGGGGSGGGGS

SEQ ID NO: 911 - protein, 20 aa, synthetic construct
  REGION 1..20: note = Synthetic
EAAAKEAAAKEAAAKEAAAK

SEQ ID NO: 912 - protein, 25 aa, synthetic construct
  REGION 1..25: note = Synthetic
GGGGSEAAAKEAAAKGGGGSEAAAK

SEQ ID NO: 913 - protein, 25 aa, synthetic construct
  REGION 1..25: note = Synthetic
EAAAKEAAAKGGGGSGGGGSGGGGS

SEQ ID NO: 914 - protein, 25 aa, synthetic construct
  REGION 1..25: note = Synthetic
EAAAKEAAAKGGGGSGGGGSEAAAK

SEQ ID NO: 915 - protein, 4 aa, synthetic construct
  REGION 1..4: note = Synthetic
SGGS

SEQ ID NO: 916 - protein, 7 aa, synthetic construct
  REGION 1..7: note = Synthetic
PKKKRKV

SEQ ID NO: 917 - protein, 9 aa, synthetic construct
  REGION 1..9: note = Synthetic
LAAKRSRTT

SEQ ID NO: 918 - protein, 9 aa, synthetic construct
  REGION 1..9: note = Synthetic
QAAKRSRTT

SEQ ID NO: 919 - protein, 10 aa, synthetic construct
  REGION 1..10: note = Synthetic
PAPAKRERTT

SEQ ID NO: 920 - protein, 9 aa, synthetic construct
  REGION 1..9: note = Synthetic
QAAKRPRTT

SEQ ID NO: 921 - protein, 9 aa, synthetic construct
  REGION 1..9: note = Synthetic
RAAKRPRTT

SEQ ID NO: 922 - protein, 11 aa, synthetic construct
  REGION 1..11: note = Synthetic
AAAKRSWSMAA

SEQ ID NO: 923 - protein, 11 aa, synthetic construct
  REGION 1..11: note = Synthetic
AAAKRVWSMAF

SEQ ID NO: 924 - protein, 11 aa, synthetic construct
  REGION 1..11: note = Synthetic
AAAKRSWSMAF

SEQ ID NO: 925 - protein, 10 aa, synthetic construct
  REGION 1..10: note = Synthetic
AAAKRKYFAA

SEQ ID NO: 926 - protein, 10 aa, synthetic construct
  REGION 1..10: note = Synthetic
RAAKRKAFAA

SEQ ID NO: 927 - protein, 10 aa, synthetic construct
  REGION 1..10: note = Synthetic
RAAKRKYFAV

SEQ ID NO: 928 - protein, 7 aa, synthetic construct
  REGION 1..7: note = Synthetic
PKKKRRV

SEQ ID NO: 929 - protein, 16 aa, synthetic construct
  REGION 1..16: note = Synthetic
KRPAATKKAGQAKKKK

SEQ ID NO: 930 - skipped

SEQ ID NO: 931 - protein, 5 aa, synthetic construct
  REGION 1..5: note = Synthetic
GGGGS

SEQ ID NO: 932 - protein, 5 aa, synthetic construct
  REGION 1..5: note = Synthetic
EAAAK

SEQ ID NO: 933 - protein, 5 aa, synthetic construct
  REGION 1..5: note = Synthetic
SEGSA

SEQ ID NO: 934 - protein, 9 aa, synthetic construct
  REGION 1..9: note = Synthetic
SEGSAGTST

SEQ ID NO: 935 - protein, 10 aa, synthetic construct
  REGION 1..10: note = Synthetic
GGGGSGGGGS

SEQ ID NO: 936 - protein, 10 aa, synthetic construct
  REGION 1..10: note = Synthetic
GGGGSEAAAK

SEQ ID NO: 937 - protein, 10 aa, synthetic construct
  REGION 1..10: note = Synthetic
EAAAKGGGGS

SEQ ID NO: 938 - protein, 10 aa, synthetic construct
  REGION 1..10: note = Synthetic
EAAAKEAAAK

SEQ ID NO: 939 - protein, 15 aa, synthetic construct
  REGION 1..15: note = Synthetic
SEGSAGTSTESEGSA

SEQ ID NO: 940 - protein, 15 aa, synthetic construct
  REGION 1..15: note = Synthetic
GGGGSGGGGSGGGGS

SEQ ID NO: 941 - protein, 15 aa, synthetic construct
  REGION 1..15: note = Synthetic
GGGGSGGGGSEAAAK

SEQ ID NO: 942 - protein, 15 aa, synthetic construct
  REGION 1..15: note = Synthetic
GGGGSEAAAKGGGGS

SEQ ID NO: 943 - protein, 15 aa, synthetic construct
  REGION 1..15: note = Synthetic
EAAAKGGGGSEAAAK

SEQ ID NO: 944 - protein, 15 aa, synthetic construct
  REGION 1..15: note = Synthetic
EAAAKEAAAKGGGGS

SEQ ID NO: 945 - protein, 20 aa, synthetic construct
  REGION 1..20: note = Synthetic
SEGSAGTSTESEGSAGTSTE

SEQ ID NO: 946 - protein, 20 aa, synthetic construct
  REGION 1..20: note = Synthetic
GGGGSGGGGSGGGGSEAAAK

SEQ ID NO: 947 - protein, 20 aa, synthetic construct
  REGION 1..20: note = Synthetic
GGGGSGGGGSEAAAKGGGGS

SEQ ID NO: 948 - protein, 20 aa, synthetic construct
  REGION 1..20: note = Synthetic
GGGGSEAAAKGGGGSEAAAK

SEQ ID NO: 949 - protein, 20 aa, synthetic construct
  REGION 1..20: note = Synthetic
GGGGSEAAAKEAAAKGGGGS

SEQ ID NO: 950 - protein, 20 aa, synthetic construct
  REGION 1..20: note = Synthetic
GGGGSEAAAKEAAAKEAAAK

SEQ ID NO: 951 - protein, 20 aa, synthetic construct
  REGION 1..20: note = Synthetic
EAAAKGGGGSGGGGSGGGGS

SEQ ID NO: 952 - protein, 20 aa, synthetic construct
  REGION 1..20: note = Synthetic
EAAAKGGGGSGGGGSEAAAK

SEQ ID NO: 953 - protein, 20 aa, synthetic construct
  REGION 1..20: note = Synthetic
EAAAKGGGGSEAAAKGGGGS

SEQ ID NO: 954 - protein, 20 aa, synthetic construct
  REGION 1..20: note = Synthetic
EAAAKGGGGSEAAAKEAAAK

SEQ ID NO: 955 - protein, 20 aa, synthetic construct
  REGION 1..20: note = Synthetic
EAAAKEAAAKGGGGSGGGGS

SEQ ID NO: 956 - protein, 20 aa, synthetic construct
  REGION 1..20: note = Synthetic
EAAAKEAAAKGGGGSEAAAK

SEQ ID NO: 957 - protein, 20 aa, synthetic construct
  REGION 1..20: note = Synthetic
EAAAKEAAAKEAAAKGGGGS

SEQ ID NO: 958 - protein, 25 aa, synthetic construct
  REGION 1..25: note = Synthetic
SEGSAGTSTESEGSAGTSTESEGSA

SEQ ID NO: 959 - protein, 25 aa, synthetic construct
  REGION 1..25: note = Synthetic
GGGGSGGGGSGGGGSGGGGSGGGGS

SEQ ID NO: 960 - protein, 25 aa, synthetic construct
  REGION 1..25: note = Synthetic
GGGGSGGGGSGGGGSGGGGSEAAAK

SEQ ID NO: 961 - protein, 25 aa, synthetic construct
  REGION 1..25: note = Synthetic
GGGGSGGGGSGGGGSEAAAKGGGGS

SEQ ID NO: 962 - protein, 25 aa, synthetic construct
  REGION 1..25: note = Synthetic
GGGGSGGGGSGGGGSEAAAKEAAAK

SEQ ID NO: 963 - protein, 25 aa, synthetic construct
  REGION 1..25: note = Synthetic
GGGGSGGGGSEAAAKGGGGSGGGGS

SEQ ID NO: 964 - protein, 25 aa, synthetic construct
  REGION 1..25: note = Synthetic
GGGGSGGGGSEAAAKGGGGSEAAAK

SEQ ID NO: 965 - protein, 25 aa, synthetic construct
  REGION 1..25: note = Synthetic
GGGGSGGGGSEAAAKEAAAKGGGGS

SEQ ID NO: 966 - protein, 25 aa, synthetic construct
  REGION 1..25: note = Synthetic
GGGGSGGGGSEAAAKEAAAKEAAAK

SEQ ID NO: 967 - protein, 25 aa, synthetic construct
  REGION 1..25: note = Synthetic
GGGGSEAAAKGGGGSGGGGSGGGGS

SEQ ID NO: 968 - protein, 25 aa, synthetic construct
  REGION 1..25: note = Synthetic
GGGGSEAAAKGGGGSGGGGSEAAAK

SEQ ID NO: 969 - protein, 25 aa, synthetic construct
  REGION 1..25: note = Synthetic
GGGGSEAAAKGGGGSEAAAKGGGGS

SEQ ID NO: 970 - protein, 25 aa, synthetic construct
  REGION 1..25: note = Synthetic
GGGGSEAAAKGGGGSEAAAKEAAAK

SEQ ID NO: 971 - protein, 25 aa, synthetic construct
  REGION 1..25: note = Synthetic
GGGGSEAAAKEAAAKGGGGSGGGGS

SEQ ID NO: 972 - protein, 25 aa, synthetic construct
  REGION 1..25: note = Synthetic
GGGGSEAAAKEAAAKEAAAKGGGGS

SEQ ID NO: 973 - protein, 25 aa, synthetic construct
  REGION 1..25: note = Synthetic
GGGGSEAAAKEAAAKEAAAKEAAAK

SEQ ID NO: 974 - protein, 25 aa, synthetic construct
  REGION 1..25: note = Synthetic
EAAAKGGGGSGGGGSGGGGSGGGGS

SEQ ID NO: 975 - protein, 25 aa, synthetic construct
  REGION 1..25: note = Synthetic
EAAAKGGGGSGGGGSGGGGSEAAAK

SEQ ID NO: 976 - protein, 25 aa, synthetic construct
  REGION 1..25: note = Synthetic
EAAAKGGGGSGGGGSEAAAKGGGGS

SEQ ID NO: 977 - protein, 25 aa, synthetic construct
  REGION 1..25: note = Synthetic
EAAAKGGGGSGGGGSEAAAKEAAAK

SEQ ID NO: 978 - protein, 25 aa, synthetic construct
  REGION 1..25: note = Synthetic
EAAAKGGGGSEAAAKGGGGSGGGGS

SEQ ID NO: 979 - protein, 25 aa, synthetic construct
  REGION 1..25: note = Synthetic
EAAAKGGGGSEAAAKGGGGSEAAAK

SEQ ID NO: 980 - protein, 25 aa, synthetic construct
  REGION 1..25: note = Synthetic
EAAAKGGGGSEAAAKEAAAKGGGGS

SEQ ID NO: 981 - protein, 25 aa, synthetic construct
  REGION 1..25: note = Synthetic
EAAAKGGGGSEAAAKEAAAKEAAAK

SEQ ID NO: 982 - protein, 25 aa, synthetic construct
  REGION 1..25: note = Synthetic
EAAAKEAAAKGGGGSEAAAKGGGGS

SEQ ID NO: 983 - protein, 25 aa, synthetic construct
  REGION 1..25: note = Synthetic
EAAAKEAAAKGGGGSEAAAKEAAAK

SEQ ID NO: 984 - protein, 25 aa, synthetic construct
  REGION 1..25: note = Synthetic
EAAAKEAAAKEAAAKGGGGSEAAAK

SEQ ID NO: 985 - protein, 25 aa, synthetic construct
  REGION 1..25: note = Synthetic
EAAAKEAAAKEAAAKEAAAKGGGGS

SEQ ID NO: 986 - protein, 25 aa, synthetic construct
  REGION 1..25: note = Synthetic
EAAAKEAAAKEAAAKEAAAKEAAAK

SEQ ID NO: 987 - protein, 16 aa, synthetic construct
  REGION 1..16: note = Synthetic
GTKDSTKDIPETPSKD

SEQ ID NO: 988 - protein, 16 aa, synthetic construct
  REGION 1..16: note = Synthetic
GRDVRQPEVKEEKPES

SEQ ID NO: 989 - protein, 16 aa, synthetic construct
  REGION 1..16: note = Synthetic
EGKSSGSGSESKSTAG

SEQ ID NO: 990 - protein, 16 aa, synthetic construct
  REGION 1..16: note = Synthetic
TPGSPAGSPTSTEEGT

SEQ ID NO: 991 - protein, 16 aa, synthetic construct
  REGION 1..16: note = Synthetic
GSEPATSGSETPGTST

SEQ ID NO: 992 - RNA, 91 nt, synthetic construct; identical to SEQ ID NO: 344
  misc_feature 1..91: note = Synthetic
  source 1..91: mol_type = other RNA

SEQ ID NO: 993 - RNA, 91 nt, synthetic construct; identical to SEQ ID NO: 346
  misc_feature 1..91: note = Synthetic
  source 1..91: mol_type = other RNA

SEQ ID NO: 994 - RNA, 91 nt, synthetic construct; identical to SEQ ID NO: 358
  misc_feature 1..91: note = Synthetic
  source 1..91: mol_type = other RNA

SEQ ID NO: 995 - RNA, 91 nt, synthetic construct; identical to SEQ ID NO: 360
  misc_feature 1..91: note = Synthetic
  source 1..91: mol_type = other RNA

SEQ ID NO: 996 - protein, 8 aa, synthetic construct
  REGION 1..8: note = Synthetic
PKKKRKVE

SEQ ID NO: 997 - protein, 7 aa, synthetic construct
  REGION 1..7: note = Synthetic
KKKRKVE

SEQ ID NO: 998 - protein, 19 aa, synthetic construct
  REGION 1..19: note = Synthetic
KRTADGSEFESPKKKRKVE

SEQ ID NO: 999 - protein, 9 aa, synthetic construct
  REGION 1..9: note = Synthetic
PAAKKKKLD

SEQ ID NO: 1000 - RNA, 106 nt, synthetic construct
  misc_feature 1..106: note = Synthetic
  variation 1..25: note = n is a, c, g, or u
  variation 21..25: note = n may be present or absent
  source 1..106: mol_type = other RNA
nnnnnnnnnnnnnnnnnnnnnnnnngttgtagctccctgaaaccgttgctacaataaggccgtcgaaagatgtgccgcaacgctctgccttctggcatcgtttatt

SEQ ID NO: 1001 - RNA, 102 nt, synthetic construct; identical to SEQ ID NO: 702
  misc_feature 1..102: note = Synthetic
  variation 1..25: note = n is a, c, g, or u
  source 1..102: mol_type = other RNA

SEQ ID NO: 1002 - RNA, 20 nt, synthetic construct
  misc_feature 1..20: note = Synthetic
  source 1..20: mol_type = other RNA
ggccacggagcgagacatct

SEQ ID NO: 1003 - RNA, 100 nt, synthetic construct
  misc_feature 1..100: note = Synthetic
  source 1..100: mol_type = other RNA
ggccacggagcgagacatctgttttagagctagaaatagcaagttaaaataaggctagtccgttatcaacttgaaaaagtggcaccgagtcggtgctttt

SEQ ID NO: 1004 - RNA, 100 nt, synthetic construct; identical to SEQ ID NO: 1003
  misc_feature 1..100: note = Synthetic
  modified_base 1: mod_base = OTHER; note = 2'-O-methyl nucleotide, phosphorothioate linkage
  modified_base 2: mod_base = OTHER; note = 2'-O-methyl nucleotide, phosphorothioate linkage
  modified_base 3: mod_base = OTHER; note = 2'-O-methyl nucleotide, phosphorothioate linkage
  modified_base 29: mod_base = OTHER; note = 2'-O-methyl nucleotide
  modified_base 30: mod_base = OTHER; note = 2'-O-methyl nucleotide
  modified_base 31: mod_base = OTHER; note = 2'-O-methyl nucleotide
  modified_base 32: mod_base = OTHER; note = 2'-O-methyl nucleotide
  modified_base 33: mod_base = OTHER; note = 2'-O-methyl nucleotide
  modified_base 34: mod_base = OTHER; note = 2'-O-methyl nucleotide
  modified_base 35: mod_base = OTHER; note = 2'-O-methyl nucleotide
  modified_base 36: mod_base = OTHER; note = 2'-O-methyl nucleotide
  modified_base 37: mod_base = OTHER; note = 2'-O-methyl nucleotide
  modified_base 38: mod_base = OTHER; note = 2'-O-methyl nucleotide
  modified_base 39: mod_base = OTHER; note = 2'-O-methyl nucleotide
  modified_base 40: mod_base = OTHER; note = 2'-O-methyl nucleotide
  modified_base 69: mod_base = OTHER; note = 2'-O-methyl nucleotide
  modified_base 70: mod_base = OTHER; note = 2'-O-methyl nucleotide
  modified_base 71: mod_base = OTHER; note = 2'-O-methyl nucleotide
  modified_base 72: mod_base = OTHER; note = 2'-O-methyl nucleotide
  modified_base 73: mod_base = OTHER; note = 2'-O-methyl nucleotide
  modified_base 74: mod_base = OTHER; note = 2'-O-methyl nucleotide
  modified_base 75: mod_base = OTHER; note = 2'-O-methyl nucleotide
  modified_base 76: mod_base = OTHER; note = 2'-O-methyl nucleotide
  modified_base 77: mod_base = OTHER; note = 2'-O-methyl nucleotide
  modified_base 78: mod_base = OTHER; note = 2'-O-methyl nucleotide
  modified_base 79: mod_base = OTHER; note = 2'-O-methyl nucleotide
  modified_base 80: mod_base = OTHER; note = 2'-O-methyl nucleotide
  modified_base 81: mod_base = OTHER; note = 2'-O-methyl nucleotide
  modified_base 82: mod_base = OTHER; note = 2'-O-methyl nucleotide
  modified_base 83: mod_base = OTHER; note = 2'-O-methyl nucleotide
  modified_base 84: mod_base = OTHER; note = 2'-O-methyl nucleotide
  modified_base 85: mod_base = OTHER; note = 2'-O-methyl nucleotide
  modified_base 86: mod_base = OTHER; note = 2'-O-methyl nucleotide
  modified_base 87: mod_base = OTHER; note = 2'-O-methyl nucleotide
  modified_base 88: mod_base = OTHER; note = 2'-O-methyl nucleotide
  modified_base 89: mod_base = OTHER; note = 2'-O-methyl nucleotide
  modified_base 90: mod_base = OTHER; note = 2'-O-methyl nucleotide
  modified_base 91: mod_base = OTHER; note = 2'-O-methyl nucleotide
  modified_base 92: mod_base = OTHER; note = 2'-O-methyl nucleotide
  modified_base 93: mod_base = OTHER; note = 2'-O-methyl nucleotide
  modified_base 94: mod_base = OTHER; note = 2'-O-methyl nucleotide
  modified_base 95: mod_base = OTHER; note = 2'-O-methyl nucleotide
  modified_base 96: mod_base = OTHER; note = 2'-O-methyl nucleotide
  modified_base 97: mod_base = OTHER; note = 2'-O-methyl nucleotide, phosphorothioate linkage
  modified_base 98: mod_base = OTHER; note = 2'-O-methyl nucleotide, phosphorothioate linkage
  modified_base 99: mod_base = OTHER; note = 2'-O-methyl nucleotide, phosphorothioate linkage
  modified_base 100: mod_base = OTHER; note = 2'-O-methyl nucleotide
  source 1..100: mol_type = other RNA

SEQ ID NO: 1005 - protein, 5 aa, synthetic construct
KTRAD